(19) United States
(12) Patent Application Publication
(10) Pub. No.: US 2011/0191910 A1
(43) Pub. Date: Aug. 4, 2011

(54) PLANTS WITH ALTERED ROOT ARCHITECTURE, RELATED CONSTRUCTS AND METHODS INVOLVING GENES ENCODING LECTIN PROTEIN KINASE (LPK) POLYPEPTIDES AND HOMOLOGS THEREOF

(75) Inventor: Graziana Taramino, Wilmington, DE (US)

(73) Assignee: E. I. DU PONT DE NEMOURS AND COMPANY, Wilmington, DE (US)

(21) Appl. No.: 13/018,521

(22) Filed: Feb. 1, 2011

Related U.S. Application Data
(60) Provisional application No. 61/300,490, filed on Feb. 2, 2010.

(51) Int. Cl. C12N 15/87; A01H 5/00; C07H 21/04; C12Q 1/68

(52) U.S. Cl. 800/290; 800/298; 800/320.1; 800/312; 800/322; 800/320; 800/320.3; 800/314; 800/320.2; 800/306; 536/23.1; 435/6.1

(57) ABSTRACT

Isolated polynucleotides and polypeptides and recombinant DNA constructs particularly useful for altering root structure of plants, compositions (such as plants or seeds) comprising these recombinant DNA constructs, and methods utilizing these recombinant DNA constructs. The recombinant DNA construct comprises a polynucleotide operably linked to a promoter functional in a plant, wherein said polynucleotide encodes a polypeptide useful for altering plant root architecture.

### FIELD OF THE INVENTION

[0001] The field of invention relates to plant breeding and genetics and, in particular, relates to recombinant DNA constructs useful in plants for altering root architecture.

### BACKGROUND OF THE INVENTION

[0002] Water and nutrient availability limit plant growth in all but a very few natural ecosystems. They limit yield in most agricultural ecosystems. Plant roots serve important functions such as water and nutrient uptake, anchorage of the plants in the soil and the establishment of biotic interactions at the rhizosphere. Elucidation of the genetic regulation of plant root development and function is therefore the subject of considerable interest in agriculture and ecology.

[0003] The root system originates from a primary root that develops during embryogenesis. The primary root produces secondary roots, which in turn produce tertiary roots. All secondary, tertiary, quaternary and further roots are referred to as lateral roots. Many plants, including maize, can also produce shoot borne roots, from consecutive under-ground nodes (crown roots) or above-ground nodes (brace roots). Three major processes affect the overall architecture of the root system. First, cell division at the primary root meristem enables indeterminate growth by adding new cells to the root. Second, lateral root formation increases the exploratory capacity of the root system. Third, root-hair formation increases the total surface of primary and lateral roots (Lopez-Bucio et al., Current Opinion in Plant Biology (2003) 6:280-287). In maize mutants have been isolated that are missing only a subset of root types. In Arabidopsis, mutations in root patterning genes such as SHORTROOT and SCARECROW, which show developmental defects in primary and lateral roots, have been identified (J. E. Malamy, Plant, Cell and Environment (2005) 28: 67-77).

[0004] A number of maize mutants affected specifically in root development have been identified (Hochholdinger et al 2004, Annals of Botany 93:359-368). The recessive mutants rtcs and rt1 forms no, or fewer, crown and brace roots, while the primary and lateral roots are not affected. In the recessive mutants des21, lateral seminal roots and root hairs are absent. Root hairs are lacking in the recessive mutant rth1-3. The mutants Irt1 and rum1 are affected before lateral root initiation and mutants slr1 and slr2 are impaired in lateral root elongation. Intrinsic response pathways that determine root system architecture include hormones, cell cycle regulators and regulatory genes. Water stress and nutrient availability belong to the environmental response pathways that determine root system architecture.

[0005] U.S. Application No. 2005-57473 filed Feb. 14, 2005 (U.S. Patent Publication No. 2005/223429 A1 published Oct. 6, 2005) concerns the use of Arabidopsis cytokinin oxidase genes to alter cytokinin levels in plants and stimulate root growth.

[0006] U.S. Pat. No. 6,344,601 (issued Feb. 5, 2002) concerns the under- or overexpression of profilin in a plant cell to alter plant growth habit, e.g. a reduced root and root hair system, delay in the onset of flowering.

[0007] US2004/016432 (filed May 21, 2004 (WO2004/106531 published Dec. 9, 2004) concerns the use of methods to manipulate the growth rate and/or yield and/or architecture by over expression of cis-prenyltransferase.

[0008] U.S. Application No. 2004/489500 filed Sep. 30, 2004 (U.S. Patent Publication No. 2005/059154 A1 published Mar. 13, 2005) concerns methods to modify cell number, architecture and yield using over expression of the transcription factor E2F in plants.

[0009] Activation tagging can be utilized to identify genes with the ability to affect a trait. This approach has been used in the model plant species Arabidopsis thaliana (Weigel et al., 2000, Plant Physiol. 122:1003-1013).

[0010] Insertions of transcriptional enhancer elements can dominantly activate and/or elevate the expression of nearby endogenous genes.

### SUMMARY OF THE INVENTION

[0011] The present invention includes:

[0012] In one embodiment, a plant comprising in its genome a recombinant DNA construct comprising a polynucleotide operably linked to at least one regulatory element, wherein said polynucleotide encodes a polypeptide having an amino acid sequence of at least 50% sequence identity, based on the Clustal V method of alignment, when compared to SEQ ID NO: 27, 29, 35, 37, 39, 41, 43, 46, 47, 48, 49, 50, 51, 52, 53, 54, 55, 56, 57, 58, 59, 68 or 70 and wherein said plant exhibits altered root architecture when compared to a control plant not comprising said recombinant DNA construct.

[0013] In another embodiment a plant comprising in its genome a recombinant DNA construct comprising a polynucleotide operably linked to at least one regulatory element, wherein said polynucleotide encodes a polypeptide having an amino acid sequence of at least 50% sequence identity, based on the Clustal V method of alignment, when compared to SEQ ID NO: 27, 29, 35, 37, 39, 41, 43, 46, 47, 48, 49, 50, 51, 52, 53, 54, 55, 56, 57, 58, 59, 68 or 70, and wherein said plant exhibits an alteration of at least one agronomic characteristic when compared to a control plant not comprising said recombinant DNA construct. Optionally, the plant exhibits said alteration of said at least one agronomic characteristic, when compared, under varying environmental condition to a control plant not comprising said recombinant DNA construct and wherein said environmental condition is at least one selected from drought, nitrogen, soil type, insect and disease. The at least one agronomic trait may be yield, biomass, root lodging, or root architecture or any combination thereof.

[0014] In another embodiment, the present invention includes any of the plants of the present invention wherein the plant is selected from the group consisting of: maize, soybean, sunflower, sorghum, canola, wheat, alfalfa, cotton, rice barley, millet, sugar cane and switchgrass.

[0015] In another embodiment, the present invention includes seed of any of the plants of the present invention, wherein said seed comprises in its genome a recombinant DNA construct comprising a polynucleotide operably linked to at least one regulatory element, wherein said polynucleotide encodes a polypeptide having an amino acid sequence of at least 50% sequence identity, based on the Clustal V method of alignment, when compared to SEQ ID NO: 27, 29, 35, 37, 39, 41, 43, 46, 47, 48, 49, 50, 51, 52, 53, 54, 55, 56, 57, 58, 59, 68 or 70 and wherein a plant produced from said seed exhibits either an alteration in root architecture, or an alteration in at least one agromomic characteristic, or both, when compared to a control plant not comprising said recombinant DNA construct. The at least one agromomic trait may be root architecture, root lodging, yield or biomass or any combination thereof.

[0016] In another embodiment, a method of altering root architecture in a plant, comprising:

[0017] (a) introducing into a regenerable plant cell a recombinant DNA construct comprising a polynucleotide operably linked to at least one regulatory sequence, wherein the polynucleotide encodes a polypeptide having an amino acid sequence of at least 50% sequence identity, based on the Clustal V method of alignment, when compared to SEQ ID NO: 27, 29, 35, 37, 39, 41, 43, 46, 47, 48, 49, 50, 51, 52, 53, 54, 55, 56, 57, 58, 59, 68 or 70;

[0018] (b) regenerating a transgenic plant from the regenerable plant cell after step (a), wherein the transgenic plant comprises in its genome the recombinant DNA construct; and

[0019] (c) obtaining a progeny plant derived from the transgenic plant of step (b), wherein said progeny plant comprises in its genome the recombinant DNA construct and exhibits an alteration in root architecture when compared to a control plant not comprising the recombinant DNA construct.

[0020] In another embodiment, a method of evaluating alteration in root architecture in a plant, comprising:

[0021] (a) obtaining a transgenic plant, wherein the transgenic plant comprises in its genome a recombinant DNA construct comprising a polynucleotide operably linked to at least one regulatory element, wherein said polynucleotide encodes a polypeptide having an amino acid sequence of at least 50% sequence identity, based on the Clustal V method of alignment, when compared to SEQ ID NO: 27, 29, 35, 37, 39, 41, 43, 46, 47, 48, 49, 50, 51, 52, 53, 54, 55, 56, 57, 58, 59, 68 or 70;

[0022] (b) obtaining a progeny plant derived from the transgenic plant, wherein the progeny plant comprises in its genome the recombinant DNA construct; and

[0023] (c) evaluating the progeny plant for alteration in root architecture compared to a control plant not comprising the recombinant DNA construct.

[0024] In another embodiment, a method of determining an alteration of at least one agromomic characteristic in a plant, comprising:

[0025] (a) obtaining a transgenic plant, wherein the transgenic plant comprises in its genome a recombinant DNA construct comprising a polynucleotide operably linked to at least one regulatory element, wherein said polynucleotide encodes a polypeptide having an amino acid sequence of at least 50% sequence identity, based on the Clustal V method of alignment, when compared to SEQ ID NO: 27, 29, 35, 37, 39, 41, 43, 46, 47, 48, 49, 50, 51, 52, 53, 54, 55, 56, 57, 58, 59, 68 or 70;

[0026] (b) obtaining a progeny plant derived from the transgenic plant, wherein the progeny plant comprises in its genome the recombinant DNA construct; and

[0027] (c) determining whether the progeny plant exhibits an alteration of at least one agronomic characteristic when compared to a control plant not comprising the recombinant DNA construct. Optionally, said determining step (c) comprises determining whether the transgenic plant exhibits an alteration of at least one agronomic characteristic when compared, under varying environmental conditions, such as drought, nitrogen, soil type, insect or disease, to a control plant not comprising the recombinant construct.

[0028] In another embodiment, the present invention includes any of the methods of the present invention wherein the plant is selected from the group consisting of:

[0029] maize, soybean, sunflower, sorghum, canola, wheat, alfalfa, cotton, rice barley, millet, sugar cane and switchgrass.

[0030] In another embodiment, the present invention includes an isolated polynucleotide comprising:

[0031] (a) a nucleotide sequence encoding a polypeptide having an amino acid sequence of at least 85%, sequence identity, based on the Clustal V method of alignment, when compared to SEQ ID NO: 35 or

[0032] (b) a full complement of the nucleotide sequence, wherein the full complement and the nucleotide sequence consist of the same number of nucleotides and are 100% complementary. The polypeptide may comprise the amino acid sequence of SEQ ID NO: 35. The nucleotide sequence may comprise the nucleotide sequence of SEQ ID NO: 34.

[0033] In another embodiment, the present invention concerns a recombinant DNA

[0034] Construct comprising any of the isolated polynucleotides of the present invention operably linked to at least one regulatory sequence, and a cell, a plant, and a seed comprising the recombinant DNA construct. The cell may be eukaryotic, e.g., a yeast, insect, or plant cell, or prokaryotic, e.g., a bacterial cell.

### BRIEF DESCRIPTION OF THE FIGURES AND SEQUENCE LISTINGS

[0035] The invention can be more fully understood from the following detailed description and the accompanying drawings and Sequence Listing which form a part of this application.

[0036] FIG. 1 shows a map of the pHSbarENDs2 activation tagging construct (SEQ ID NO:1) used to make the Arabidopsis populations.

[0037] FIG. 2 shows a map of the vector pDONR™/Zeo (SEQ ID NO:2). The attP1 site is at nucleotides 570-801; the attP2 site is at nucleotides 2754-2985 (complementary strand).

[0038] FIG. 3 shows a map of the vector pDONR™221 (SEQ ID NO:3). The attP1 site is at nucleotides 570-801; the attP2 site is at nucleotides 2754-2985 (complementary strand).

[0039] FIG. 4 shows a map of the vector pBC-yellow (SEQ ID NO:4), a destination vector for use in construction of expression vectors for Arabidopsis. The attR1 site is at nucleotides 11276-11399 (complementary strand); the attR2 site is at nucleotides 9695-9819 (complementary strand).

[0040] FIG. 5 shows a map of PHP27840 (SEQ ID NO:5), a destination vector for use in construction of expression vectors for soybean. The attR1 site is at nucleotides 7310-7434; the attR2 site is at nucleotides 8890-9014.

[0041] FIG. 6 shows a map of PHP23236 (SEQ ID NO:6), a destination vector for use in construction of expression vectors for Gaspe Flint derived maize lines. The attR1 site is at nucleotides 2006-2130; the attR2 site is at nucleotides 2899-3023.

[0042] FIG. 7 shows a map of PHP10523 (SEQ ID NO:7), a plasmid DNA present in Agrobacterium strain LBA4404.

[0043] FIG. 8 shows a map of PHP23235 (SEQ ID NO:8), a vector used to construct the destination vector PHP23236.

[0044] FIG. 9 shows a map of the entry clone PHP20234 (SEQ ID NO:9), a vector carrying the PINII terminator. The attR2 site is at nucleotides 591-747; the attL3 site is at nucleotides 1100-1195.

[0045] FIG. 10 shows a map of PHP28529 (SEQ ID NO:10), a destination vector for use in construction of expression vectors for maize lines. The attR3 site is at nucleotides 3613-3737; the attR4 site is at nucleotides 2035-2159.

[0046] FIG. 11 shows a map of the entry clone PHP28408 (SEQ ID NO:11), a vector carrying the constitutive maize GOS2 promoter. The attL4 site is at nucleotides 160-255; the attR1 site is at nucleotides 2301-2447.

[0047] FIG. 12 shows a map of the entry clone PHP22020 (SEQ ID NO:12), a vector carrying the root maize NAS2 promoter. The attR1 site is at nucleotides 31-187; the attL4 site is at nucleotides 2578-2673.

[0048] FIG. 13 shows a map of PHP29635 (SEQ ID NO:13), a destination vector for use in construction of expression vectors for Gaspe Flint derived maize lines. The attR1 site is at nucleotides 40786-40910; the attR2 site is at nucleotides 41679-41803.

[0049] FIG. 14 shows a map of PIIOXS2a-FRT87(ni)m (SEQ ID NO:18), a vector used to construct the destination vector PHP29635.

[0050] FIGS. 15A through 15K show the multiple alignment of the full length amino acid sequences of SEQ ID NOs: 27, 29, 35, 37, 39, 41, 43, 46, 47, 48, 49, 50, 51, 52, 53, 54, 55, 56, 57, 58, 59, 68 or 70. Residues that match the Consensus sequence exactly are shaded. The consensus sequence is shown above each alignment. The consensus residues are determined by a straight majority.

[0051] FIG. 16 shows a chart of the percent sequence identity and the divergence values for each pair of amino acid sequences of the LPK homologs displayed in FIGS. 15A through 15K.

[0052] FIG. 17 is the growth medium used for semi-hydroponics maize growth in Example 17.

[0053] FIG. 18 is a chart setting forth data relating to the effect of different nitrate concentrations on the growth and development of Gaspe Flint derived maize lines in Example 17.

[0054] FIG. 19 shows a map of PHP28647 (SEQ ID NO:62).

[0055] FIG. 20 shows a map of PHP33692 (SEQ ID NO:63).

[0056] FIG. 21 shows a map of PHP19770 (SEQ ID NO:64).

[0057] FIG. 22 shows a map of PHP21737 (SEQ ID NO:65).

[0058] FIG. 23 shows a map of PHP29559 (SEQ ID NO:66)

[0059] The sequence descriptions and Sequence Listing attached hereto comply with the rules governing nucleotide and/or amino acid sequence disclosures in patent applications as set forth in 37 C.F.R. §1.821-1.825.

[0060] The Sequence Listing contains the one letter code for nucleotide sequence characters and the three letter codes for amino acids as defined in conformity with the IUPAC-IUBMB standards described in Nucleic Acids Res. 13:3021-3030 (1985) and in the Biochemical J. 219 (No. 2):345-373 (1984) which are herein incorporated by reference. The symbols and format used for nucleotide and amino acid sequence data comply with the rules set forth in 37 C.F.R. §1.822.

[0061] SEQ ID NO:1 pHSbarENDs2

[0062] SEQ ID NO:2 pDONR™/Zeo

[0063] SEQ ID NO:3 pDONR™221

[0064] SEQ ID NO:4 pBC-yellow

[0065] SEQ ID NO:5 PHP27840

[0066] SEQ ID NO:6 PHP23236

[0067] SEQ ID NO:7 PHP10523

[0068] SEQ ID NO:8 PHP23235

[0069] SEQ ID NO:9 PHP20234

[0070] SEQ ID NO:10 PHP28529

[0071] SEQ ID NO:11 PHP28408

[0072] SEQ ID NO:12 PHP22020

[0073] SEQ ID NO:13 PHP29635

[0074] SEQ ID NO:14 is the attB1 sequence.

[0075] SEQ ID NO:15 is the attB2 sequence.

[0076] SEQ ID NO:16 is the forward primer VC062 in Example 9.

[0077] SEQ ID NO:17 is the reverse primer VC063 in Example 9.

[0078] SEQ ID NO:18 PIIOXS2a-FRT87(ni)m.

[0079] SEQ ID NO:19 is the maize NAS2 promoter.

[0080] SEQ ID NO:20 is the GOS2 promoter.

[0081] SEQ ID NO:21 is the ubiquitin promoter.

[0082] SEQ ID NO:22 is the S2A promoter.

[0083] SEQ ID NO:23 is the PINII terminator.

TABLE 1
LPK domain-containing protein (LPK)

| | | SEQ ID NO: | SEQ ID NO: |
|---|---|---|---|
| Protein | Clone Designation | (Nucleotide) | (Amino Acid) |
| LPK | p0050.cjlae47r | 24 | 25 |
| LPK | p0110.cgsmp02r | 26 | 27 |
| LPK | cfp6n.pk065.d16:fis | 28 | 29 |
| LPK | sbacm.pk094.p8.f | 30 | 31 |
| LPK | adf2c.pk002.h2 | 32 | 33 |
| LPK | Pred1* | 34 | 35 |
| LPK | Pred2* | 36 | 37 |
| LPK | Pred3* | 38 | 39 |
| LPK | custom6.pk880.d9** | 40 | 41 |
| LPK | custom5.pk735.d4 | 42 | 43 |
| LPK | Resurrection grass | 67 | 68 |
| | assm_NODE_38031 | | |
| LPK | Resurrection grass | 69 | 70 |
| | assm_NODE_175180 | | |

*Sequences labeled with a star were derived from partial sequence clones using sequence prediction software. Pred1 was derived using FGENESH prediction (see also Example 8) from public BAC AC216209 ZMMBBc0221J05 chr1 and the sequence of clone p0050.cjlae47r. Pred2 was derived using public gene prediction Glyma18g40290.1 JGI version 1.01 and the sequence of clone sbacm.pk094.p8.f. Pred3 was derived using public gene prediction At5g60280.1 TAIR version 9 and the sequence of clone adf2c.pk002.h2.. Additionally, these sequences were aligned with sequences from other species, and manually edited to remove putative introns. Primers designed based on the genomic locus of each of the sequences were used for long range genomic PCR capture. The resulting PCR product was sequenced and the FGENESH program and manually editing was used to predict each coding sequences.
**this sequence was captured using public BAC b0245n20 published in the Maize GDB and primers LPK F and LPK R (SEQ ID NO: 60 and SEQ ID NO: 61, respectively).

[0084] SEQ ID NO:44 corresponds to the nucleotide sequence (locus AT5G60270) encoding an Arabidopsis thaliana Lectin protein Kinase (LPK) protein.

[0085] SEQ ID NO:45 corresponds to the coding sequence of the Arabidopsis thaliana LPK encoded by nucleotides 191-1081 (Stop) of SEQ ID NO:34.

[0086] SEQ ID NO:46 corresponds to the Arabidopsis thaliana LPK domain-containing protein (LPK) (AT5G60270) locus.

[0087] SEQ ID NO:47 corresponds to NCBI GI NO:226528693 (Zea mays).

[0088] SEQ ID NO:48 corresponds to NCBI GI NO:226502714 (Zea mays).

[0089] SEQ ID NO:49 corresponds to NCBI GI NO:242032451 (Sorghum bicolor).

[0090] SEQ ID NO:50 corresponds to NCBI GI NO:38112427 (Medicago trunculata)

[0091] SEQ ID NO:51 corresponds to NCBI GI NO:15239261 (Arabidopsis thaliana).

[0092] SEQ ID NO:52 corresponds to NCBI GI NO:242095594 (Sorghum bicolor).

[0093] SEQ ID NO:53 corresponds to NCBI GI NO:15239260 (Arabidopsis thaliana).

[0094] SEQ ID NO:54 corresponds to SEQ ID NO:138302 in EP2090662 (Oryza sativa).

[0095] SEQ ID NO:55 corresponds to SEQ ID NO:69317 in EP2090662 (Zea mays).

[0096] SEQ ID NO:56 corresponds to SEQ ID NO:193726 in EP2090662 (Glycine max).

[0097] SEQ ID NO:57 corresponds to SEQ ID NO: 167274 in EP 2090662 (Arabidopsis thaliana).

[0098] SEQ ID NO:58 corresponds to SEQ ID NO:167322 in EP2090662 (Zea mays).

[0099] SEQ ID NO:59 corresponds to SEQ ID NO:167272 in EP2090662 (Arabidopsis thaliana).

[0100] SEQ ID NO:60 corresponds to the nucleotide sequence of the LPK F primer.

[0101] SEQ 1D NO:61 corresponds to the nucleotide sequence of the LPK R primer.

[0102] SEQ ID NO:62 corresponds to the nucleotide sequence vector of PHP28647.

[0103] SEQ ID NO:63 corresponds to the nucleotide sequence of vector PHP33692.

[0104] SEQ ID NO:64 corresponds to the nucleotide sequence of vector PHP19770.

[0105] SEQ ID NO:65 corresponds to the nucleotide sequence of vector PHP21737.

[0106] SEQ ID NO:66 corresponds to the nucleotide sequence of vector PHP29559.

[0107] SEQ ID NO:67 corresponds to the nucleotide sequence of Resurrection grass node 38031.

[0108] SEQ ID NO:68 corresponds to the protein sequence of Resurrection grass node 38031.

[0109] SEQ ID NO:69 corresponds to the nucleotide sequence of Resurrection grass node 175180.

[0110] SEQ ID NO:70 corresponds to the nucleotide sequence of Resurrection grass node 175180.

[0111] SEQ ID NO:71 corresponds to the protein sequence of the hypothetical protein from Sorghum bicolor, XP002461846.

[0112] SEQ ID NO:72 corresponds to the protein sequence of the hypothetical protein from Sorghum bicolor, XP002441536.

### DETAILED DESCRIPTION OF EMBODIMENTS

[0113] The disclosure of each reference set forth herein is hereby incorporated by reference in its entirety.

[0114] As used herein and in the appended claims, the singular forms “a”, “an”, and “the” include plural reference unless the context clearly dictates otherwise. Thus, for example, reference to “a plant” includes a plurality of such plants, reference to “a cell” includes one or more cells and equivalents thereof known to those skilled in the art, and so forth.

[0115] The term “root architecture” refers to the arrangement of the different parts that comprise the root. The terms “root architecture”, “root structure”, “root system” or “root system architecture” are used interchangeably herewithin.

[0116] In general, the first root of a plant that develops from the embryo is called the primary root. In most dicots, the primary root is called the taproot. This main root grows downward and gives rise to branch (lateral) roots. In monocots the primary root of the plant branches, giving rise to a fibrous root system.

[0117] The term “altered root architecture” refers to aspects of alterations of the different parts that make up the root system at different stages of its development compared to a reference or control plant. It is understood that altered root architecture encompasses alterations in one or more measurable parameters, including but not limited to, the diameter, length, number, angle or surface of one or more of the root system parts, including but not limited to, the primary root, lateral or branch root, adventitious root, and root hairs, all of which fall within the scope of this invention. These changes can lead to an overall alteration in the area or volume occupied by the root. The reference or control plant does not comprise in its genome the recombinant DNA construct or heterologous construct.

[0118] An “Expressed Sequence Tag” (“EST”) is a DNA sequence derived from a cDNA library and therefore is a sequence which has been transcribed. An EST is typically obtained by a single sequencing pass of a cDNA insert. The sequence of an entire cDNA insert is termed the “Full-Insert Sequence” (“FIS”). A “Contig” sequence is a sequence assembled from two or more sequences that can be selected from, but not limited to, the group consisting of an EST, FIS and PCR sequence. A sequence encoding an entire or functional protein is termed a “Complete Gene Sequence” (“CGS”) and can be derived from an FIS or a contig.

[0119] The term “V” stage refers to the leaf stages of a corn plant; e.g. V4=four, V5=five leaves with visible leaf collars. The leaf collar is the light-colored collar-like “band” located at the base of an exposed leaf blade, near the spot where the leaf blade comes in contact with the stem of the plant. The leaves are counted beginning with the lowermost, short, rounded-tip true leaf and ending with the uppermost leaf with a visible leaf collar.

[0120] “Agronomic characteristics” is a measurable parameter including but not limited to of greenness, yield, growth rate, biomass, fresh weight at maturation, dry weight at maturation, fruit yield, seed yield, total plant nitrogen content, fruit nitrogen content, seed nitrogen content, whole plant free amino acid content, fruit free amino acid content, seed free amino acid content, fruit protein content, seed protein content, protein content in a vegetative tissue, drought tolerance, nitrogen uptake, root lodging, harvest index, stalk lodging, plant height, ear height, ear length, early seedling vigor and seedling emergence under low temperature stress.

[0121] “Ipk” (lectin protein kinase), “at-lpk” (Arabidopsis thaliana—lectin protein kinase) are used interchangeably herewithin and refer to the Arabidopsis thaliana locus, AT5G60270 (SEQ ID NO:34) and to nucleotide homologs from different species, such as corn, of the Arabidopsis thaliana “LPK” locus, AT5G60270 and includes without limitation the nucleotide sequences of SEQ ID NOs:24, 26, 28, 30, 32, 67 and 69. In addition two different splice variants of the Arabidopsis lpk gene have been identified: AT5G60270 (SEQ ID NO: 36) and AT5G60270 (SEQ ID NO:38), both encode the amino acid sequence presented in SEQ ID NO: 41.

[0122] “LPK”, “AT-LPK”, lectin protein kinase refers to the protein (SEQ ID NO:40) encoded by AT5G60270 (SEQ ID NO:34) and to protein homologs from different species, such as corn, soybean, and Arabidopsis thaliana, of the Arabidopsis thaliana “LPK” and includes without limitation the amino acid sequence of SEQ ID NOs: 27, 29, 35, 37, 39, 41, 43, 46, 47, 48, 49, 50, 51, 52, 53, 54, 55, 56, 57, 58, 59, 68 or 70.

[0123] Environmental conditions” refer to conditions under which the plant is grown, such as the availability of water, availability of nutrients (for example nitrogen), or the presence of disease.

[0124] “Transgenic” refers to any cell, cell line, callus, tissue, plant part or plant, the genome of which has been altered by the presence of a heterologous nucleic acid, such as a recombinant DNA construct, including those initial transgenic events as well as those created by sexual crosses or asexual propagation from the initial transgenic event. The term “transgenic” as used herein does not encompass the alteration of the genome (chromosomal or extra-chromosomal) by conventional plant breeding methods or by naturally occurring events such as random cross-fertilization, non-recombinant viral infection, non-recombinant bacterial transformation, non-recombinant transposition, or spontaneous mutation

[0125] “Genome” as it applies to plant cells encompasses not only chromosomal DNA found within the nucleus, but organelle DNA found within subcellular components (e.g., mitochondrial, plastid) of the cell.

[0126] “Plant” includes reference to whole plants, plant organs, plant tissues, seeds and plant cells and progeny of same. Plant cells include, without limitation, cells from seeds, suspension cultures, embryos, meristematic regions, callus tissue, leaves, roots, shoots, gametophytes, sporophytes, pollen, and microspores.

[0127] “Progeny” comprises any subsequent generation of a plant.

[0128] “Transgenic” refers to any cell, cell line, callus, tissue, plant part or plant, the genome of which has been altered by the presence of a heterologous nucleic acid, such as a recombinant DNA construct, including those initial transgenic events as well as those created by sexual crosses or asexual propagation from the initial transgenic event. The term “transgenic” as used herein does not encompass the alteration of the genome (chromosomal or extra-chromosomal) by conventional plant breeding methods or by naturally occurring events such as random cross-fertilization, non-recombinant viral infection, non-recombinant bacterial transformation, non-recombinant transposition, or spontaneous mutation.

[0129] “Transgenic plant” includes reference to a plant which comprises within its genome a heterologous polynucleotide. The heterologous polynucleotide may be stably integrated within the genome such that the polynucleotide is passed on to successive generations. The heterologous polynucleotide may be integrated into the genome alone or as part of a recombinant DNA construct.

[0130] “Heterologous” with respect to sequence means a sequence that originates from a foreign species, or, if from the same species, is substantially modified from its native form in composition and/or genomic locus by deliberate human intervention.

[0131] “Polynucleotide”, “nucleic acid sequence”, “nucleotide sequence”, or “nucleic acid fragment” are used interchangeably and is a polymer of RNA or DNA that is single- or double-stranded, optionally containing synthetic, non-natural or altered nucleotide bases. Nucleotides (usually found in their 5′-monophosphate form) are referred to by their single letter designation as follows: “A” for adenylate or deoxyadenylate (for RNA or DNA, respectively), “C” for cytidylate or deoxycytidylate, “G” for guanylate or deoxyguanylate, “U” for uridylate, “T” for deoxythymidylate, “R” for purines (A or G), “Y” for pyrimidines (C or T), “K” for G or T, “H” for A or C or T, “I” for inosine, and “N” for any nucleotide.

[0132] “Polypeptide”, “peptide”, “amino acid sequence” and “protein” are used interchangeably herein to refer to a polymer of amino acid residues. The terms apply to amino acid polymers in which one or more amino acid residue is an artificial chemical analogue of a corresponding naturally occurring amino acid, as well as to naturally occurring amino acid polymers. The terms “polypeptide”, “peptide”, “amino acid sequence”, and “protein” are also inclusive of modifications including, but not limited to, glycosylation, lipid attachment, sulfation, gamma-carboxylation of glutamic acid residues, hydroxylation and ADP-ribosylation.

[0133] “Messenger RNA (mRNA)” refers to the RNA that is without introns and that can be translated into protein by the cell.

[0134] “cDNA” refers to a DNA that is complementary to and synthesized from a mRNA template using the enzyme reverse transcriptase. The cDNA can be single-stranded or converted into the double-stranded form using the Klenow fragment of DNA polymerase I.

[0135] “Mature” protein refers to a post-translationally processed polypeptide; i.e., one from which any pre- or pro-peptides present in the primary translation product have been removed.

[0136] “Precursor” protein refers to the primary product of translation of mRNA; i.e., with pre- and pro-peptides still present. Pre- and pro-peptides may be and are not limited to intracellular localization signals.

[0137] “Isolated” refers to materials, such as nucleic acid molecules and/or proteins, which are substantially free or otherwise removed from components that normally accompany or interact with the materials in a naturally occurring environment. Isolated polynucleotides may be purified from a host cell in which they naturally occur. Conventional nucleic acid purification methods known to skilled artisans may be used to obtain isolated polynucleotides. The term also embraces recombinant polynucleotides and chemically synthesized polynucleotides.

[0138] “Recombinant” refers to an artificial combination of two otherwise separated segments of sequence, e.g., by chemical synthesis or by the manipulation of isolated segments of nucleic acids by genetic engineering techniques. “Recombinant” also includes reference to a cell or vector, that has been modified by the introduction of a heterologous nucleic acid or a cell derived from a cell so modified, but does not encompass the alteration of the cell or vector by naturally occurring events (e.g., spontaneous mutation, natural transformation/transduction/transposition) such as those occurring without deliberate human intervention.

[0139] “Recombinant DNA construct” refers to a combination of nucleic acid fragments that are not normally found together in nature. Accordingly, a recombinant DNA construct may comprise regulatory sequences and coding sequences that are derived from different sources, or regulatory sequences and coding sequences derived from the same source, but arranged in a manner different than that normally found in nature.

[0140] The terms “entry clone” and “entry vector” are used interchangeably herein.

[0141] “Regulatory sequences” refer to nucleotide sequences located upstream (5′ non-coding sequences), within, or downstream (3′ non-coding sequences) of a coding sequence, and which influence the transcription, RNA processing or stability, or translation of the associated coding sequence. Regulatory sequences may include, but are not limited to, promoters, translation leader sequences, introns, and polyadenylation recognition sequences.

[0142] “Promoter” refers to a nucleic acid fragment capable of controlling transcription of another nucleic acid fragment.

[0143] “Promoter functional in a plant” is a promoter capable of controlling transcription in plant cells whether or not its origin is from a plant cell.

[0144] “Tissue-specific promoter” and “tissue-preferred promoter” are used interchangeably, and refer to a promoter that is expressed predominantly but not necessarily exclusively in one tissue or organ, but that may also be expressed in one specific cell.

[0145] “Developmentally regulated promoter” refers to a promoter whose activity is determined by developmental events.

[0146] “Operably linked” refers to the association of nucleic acid fragments in a single fragment so that the function of one is regulated by the other. For example, a promoter is operably linked with a nucleic acid fragment when it is capable of regulating the transcription of that nucleic acid fragment.

[0147] “Expression” refers to the production of a functional product. For example, expression of a nucleic acid fragment may refer to transcription of the nucleic acid fragment (e.g., transcription resulting in mRNA or functional RNA) and/or translation of mRNA into a precursor or mature protein.

[0148] “Phenotype” means the detectable characteristics of a cell or organism.

[0149] “Introduced” in the context of inserting a nucleic acid fragment (e.g., a recombinant DNA construct) into a cell, means “transfection” or “transformation” or “transduction” and includes reference to the incorporation of a nucleic acid fragment into a eukaryotic or prokaryotic cell where the nucleic acid fragment may be incorporated into the genome of the cell (e.g., chromosome, plasmid, plastid or mitochondrial DNA), converted into an autonomous replicon, or transiently expressed (e.g., transfected mRNA).

[0150] A “transformed cell” is any cell into which a nucleic acid fragment (e.g., a recombinant DNA construct) has been introduced.

[0151] “Transformation” as used herein refers to both stable transformation and transient transformation.

[0152] “Stable transformation” refers to the introduction of a nucleic acid fragment into a genome of a host organism resulting in genetically stable inheritance. Once stably transformed, the nucleic acid fragment is stably integrated in the genome of the host organism and any subsequent generation.

[0153] “Transient transformation” refers to the introduction of a nucleic acid fragment into the nucleus, or DNA-containing organelle, of a host organism resulting in gene expression without genetically stable inheritance.

[0154] “Allele” is one of several alternative forms of a gene occupying a given locus on a chromosome. When the alleles present at a given locus on a pair of homologous chromosomes in a diploid plant are the same that plant is homozygous at that locus. If the alleles present at a given locus on a pair of homologous chromosomes in a diploid plant differ that plant is heterozygous at that locus. If a transgene is present on one of a pair of homologous chromosomes in a diploid plant that plant is hemizygous at that locus.

[0155] Sequence alignments and percent identity calculations may be determined using a variety of comparison methods designed to detect homologous sequences including, but not limited to, the Megalign® program of the LASERGENE® bioinformatics computing suite (DNASTAR® Inc., Madison, Wis.). Unless stated otherwise, multiple alignment of the sequences provided herein were performed using the Clustal V method of alignment (Higgins and Sharp (1989) CABIOS. 5:151-153) with the default parameters (GAP PENALTY=10, GAP LENGTH PENALTY=10). Default parameters for pairwise alignments and calculation of percent identity of protein sequences using the Clustal V method are KTUPLE=1, GAP PENALTY=3, WINDOW=5 and DIAGONALS SAVED=5. For nucleic acids these parameters are KTUPLE=2, GAP PENALTY=5, WINDOW=4 and DIAGONALS SAVED=4. After alignment of the sequences, using the Clustal V program, it is possible to obtain “percent identity” and “divergence” values by viewing the “sequence distances” table on the same program; unless stated otherwise, percent identities and divergences provided and claimed herein were calculated in this manner.

[0156] Standard recombinant DNA and molecular cloning techniques used herein are well known in the art and are described more fully in Sambrook, J., Fritsch, E. F. and Maniatis, T. Molecular Cloning: A Laboratory Manual; Cold Spring Harbor Laboratory Press: Cold Spring Harbor, 1989 (hereinafter “Sambrook”).

[0157] Association mapping of genes. The goal of gene mapping is to identify genes which contribute to phenotypes of interest. The first stage of mapping is usually to locate a general region of a chromosome which is associated with transmission of the phenotypes of interest of interest. Next, the gene and ultimately, particular alleles, are identified as having a causative role.

[0158] One approach to gene mapping (linkage analysis) uses maize lines with a known pedigree structure. Individuals are genotyped at random markers spread across the genome. If a disease gene is close to one of the markers then, within the pedigree, the inheritance pattern at the marker will mimic the inheritance pattern of the phenotype of interest. Linkage analysis has been highly successful at finding genes for simple genes associated with a phenotype of interest: i.e., those in which a single major gene is responsible for the photype in a given pedigree, and environmental factors are not very important.

[0159] A second approach to gene mapping (association, or disequilibrium mapping) uses associations at the population level. The idea is that a phenotype of interest arises on a particular haplotype background, and so individuals who inherit the phenotype of interest will also inherit the same alleles at nearby marker loci. This process is complicated by recombination and mutation. In a sense, association mapping is not fundamentally different from linkage analysis, but instead of using a family pedigree, an unknown population genealogy is used. Because the population genealogy is much deeper than a family pedigree, disequilibrium mapping permits much finer-scale mapping than does linkage analysis. An overview of the association mapping strategies and analysis is given in “Association Mapping in Plants, Oraguzie, N. C.; Rikkerink, E. H. A.; Gardiner, S. E.; Silva, H. N.d. Springer January 2007.”

[0160] Turning now to embodiments:

[0161] Embodiments include isolated polynucleotides and polypeptides, recombinant DNA constructs, compositions (such as plants or seeds) comprising these recombinant DNA constructs, and methods utilizing these recombinant DNA constructs.

[0162] Isolated Polynucleotides and Polypeptides

[0163] The present invention includes the following isolated polynucleotides and polypeptides:

[0164] An isolated polynucleotide comprising: (i) a nucleic acid sequence encoding a polypeptide having an amino acid sequence of at least 50%, 51%, 52%, 53%, 54%, 55%, 56%, 57%, 58%, 59%, 60%, 56%, 62%, 63%, 64%, 65%, 66%, 67%, 68%, 69%, 70%, 71%, 72%, 73%, 74%, 75%, 76%, 77%, 78%, 79%, 80%, 81%, 82%, 83%, 84%, 85%, 86%, 87%, 88%, 89%, 90%, 91%, 92%, 93%, 94%, 95%, 96%, 97%, 98%, 99%, or 100% sequence identity, based on the Clustal V method of alignment, when compared to SEQ ID NO: 27, 29, 35, 37, 39, 41, 43, 46, 47, 48, 49, 50, 51, 52, 53, 54, 55, 56, 57, 58, 59, 68 or 70; or (ii) a full complement of the nucleic acid sequence of (i). Any of the foregoing isolated polynucleotides may be utilized in any recombinant DNA constructs (including suppression DNA constructs) of the present invention. The polypeptide may be a LPK protein.

[0165] An isolated polypeptide having an amino acid sequence of at least 50%, 51%, 52%, 53%, 54%, 55%, 56%, 57%, 58%, 59%, 60%, 56%, 62%, 63%, 64%, 65%, 66%, 67%, 68%, 69%, 70%, 71%, 72%, 73%, 74%, 75%, 76%, 77%, 78%, 79%, 80%, 81%, 82%, 83%, 84%, 85%, 86%, 87%, 88%, 89%, 90%, 91%, 92%, 93%, 94%, 95%, 96%, 97%, 98%, 99%, or 100% sequence identity, based on the Clustal V method of alignment, when compared to SEQ ID NO: 27, 29, 35, 37, 39, 41, 43, 46, 47, 48, 49, 50, 51, 52, 53, 54, 55, 56, 57, 58, 59, 68 or 70. The polypeptide may be a LPK protein.

[0166] An isolated polynucleotide comprising (i) a nucleic acid sequence of at least 50%, 51%, 52%, 53%, 54%, 55%, 56%, 57%, 58%, 59%, 60%, 56%, 62%, 63%, 64%, 65%, 66%, 67%, 68%, 69%, 70%, 71%, 72%, 73%, 74%, 75%, 76%, 77%, 78%, 79%, 80%, 81%, 82%, 83%, 84%, 85%, 86%, 87%, 88%, 89%, 90%, 91%, 92%, 93%, 94%, 95%, 96%, 97%, 98%, 99%, or 100% sequence identity, based on the Clustal V method of alignment, when compared to SEQ ID NO: 26, 28, 34, 36, 38, 40, 42, 45, 67 or 69 (ii) a full complement of the nucleic acid sequence of (i). Any of the foregoing isolated polynucleotides may be utilized in any recombinant DNA constructs (including suppression DNA constructs) of the present invention. The isolated polynucleotide encodes a LPK protein.

[0167] Recombinant DNA Constructs and Suppression DNA Constructs.

[0168] In one aspect, the present invention includes recombinant DNA constructs (including suppression DNA constructs).

[0169] In one embodiment, a recombinant DNA construct comprises a polynucleotide operably linked to at least one regulatory sequence (e.g., a promoter functional in a plant), wherein the polynucleotide comprises (i) a nucleic acid sequence encoding an amino acid sequence of at least 50%, 51%, 52%, 53%, 54%, 55%, 56%, 57%, 58%, 59%, 60%, 56%, 62%, 63%, 64%, 65%, 66%, 67%, 68%, 69%, 70%, 71%, 72%, 73%, 74%, 75%, 76%, 77%, 78%, 79%, 80%, 81%, 82%, 83%, 84%, 85%, 86%, 87%, 88%, 89%, 90%, 91%, 92%, 93%, 94%, 95%, 96%, 97%, 98%, 99%, or 100% sequence identity, based on the Clustal V method of alignment, when compared to SEQ ID NO: 27, 29, 35, 37, 39, 41, 43, 46, 47, 48, 49, 50, 51, 52, 53, 54, 55, 56, 57, 58, 59, 68 or 70, or (ii) a full complement of the nucleic acid sequence of (i).

[0170] In another embodiment, a recombinant DNA construct comprises a polynucleotide operably linked to at least one regulatory sequence (e.g., a promoter functional in a plant), wherein said polynucleotide comprises (i) a nucleic acid sequence of at least 50%, 51%, 52%, 53%, 54%, 55%, 56%, 57%, 58%, 59%, 60%, 56%, 62%, 63%, 64%, 65%, 66%, 67%, 68%, 69%, 70%, 71%, 72%, 73%, 74%, 75%, 76%, 77%, 78%, 79%, 80%, 81%, 82%, 83%, 84%, 85%, 86%, 87%, 88%, 89%, 90%, 91%, 92%, 93%, 94%, 95%, 96%, 97%, 98%, 99%, or 100% sequence identity, based on the Clustal V method of alignment, when compared to SEQ ID NO: 26, 28, 34, 36, 38, 40, 42, 45, 67 or 69 (ii) a full complement of the nucleic acid sequence of (i).

[0171] FIGS. 15A through 15 K shows the multiple alignment of the full length amino acid sequences of SEQ ID NOs: 27, 29, 35, 37, 39, 41, 43, 46, 47, 48, 49, 50, 51, 52, 53, 54, 55, 56, 57, 58, and 59. The multiple alignment of the sequences was performed using the Megalign® program of the LASERGENE® bioinformatics computing suite (DNASTAR® Inc., Madison, Wis.); in particular, using the Clustal V method of alignment (Higgins and Sharp (1989) CABIOS. 5:151-153) with the multiple alignment default parameters of GAP PENALTY=10 and GAP LENGTH PENALTY=10, and the pairwise alignment default parameters of KTUPLE=1, GAP PENALTY=3, WINDOW=5 and DIAGONALS SAVED=5.

[0172] FIG. 16 shows the percent sequence identity and the divergence values for each pair of amino acids sequences displayed in FIGS. 15A through 15K.

[0173] In another embodiment, a recombinant DNA construct comprises a polynucleotide operably linked to at least one regulatory sequence (e.g., a promoter functional in a plant), wherein said polynucleotide encodes a LPK protein.

[0174] In another aspect, the present invention includes suppression DNA constructs.

[0175] A suppression DNA construct may comprise at least one regulatory sequence (e.g. a promoter functional in a plant) operably linked to (a) all or part of (i) a nucleic acid sequence encoding a polypeptide having an amino acid sequence of at least 50%, 51%, 52%, 53%, 54%, 55%, 56%, 57%, 58%, 59%, 60%, 56%, 62%, 63%, 64%, 65%, 66%, 67%, 68%, 69%, 70%, 71%, 72%, 73%, 74%, 75%, 76%, 77%, 78%, 79%, 80%, 81%, 82%, 83%, 84%, 85%, 86%, 87%, 88%, 89%, 90%, 91%, 92%, 93%, 94%, 95%, 96%, 97%, 98%, 99%, or 100% sequence identity, based on the Clustal V method of alignment, when compared to SEQ ID NO: 27, 29, 35, 37, 39, 41, 43, 46, 47, 48, 49, 50, 51, 52, 53, 54, 55, 56, 57, 58, 59, 68 or 70, or (ii) a full complement of the nucleic acid sequence of (a)(i); or (b) a region derived from all or part of a sense strand or antisense strand of a target gene of interest, said region having a nucleic acid sequence of at least 50%, 51%, 52%, 53%, 54%, 55%, 56%, 57%, 58%, 59%, 60%, 56%, 62%, 63%, 64%, 65%, 66%, 67%, 68%, 69%, 70%, 71%, 72%, 73%, 74%, 75%, 76%, 77%, 78%, 79%, 80%, 81%, 82%, 83%, 84%, 85%, 86%, 87%, 88%, 89%, 90%, 91%, 92%, 93%, 94%, 95%, 96%, 97%, 98%, 99%, or 100% sequence identity, based on the Clustal V method of alignment, when compared to said all or part of a sense strand or antisense strand from which said region is derived, and wherein said target gene of interest encodes a LPK protein; or (c) all or part of (i) a nucleic acid sequence of at least 50%, 51%, 52%, 53%, 54%, 55%, 56%, 57%, 58%, 59%, 60%, 56%, 62%, 63%, 64%, 65%, 66%, 67%, 68%, 69%, 70%, 71%, 72%, 73%, 74%, 75%, 76%, 77%, 78%, 79%, 80%, 81%, 82%, 83%, 84%, 85%, 86%, 87%, 88%, 89%, 90%, 91%, 92%, 93%, 94%, 95%, 96%, 97%, 98%, 99%, or 100% sequence identity, based on the Clustal V method of alignment, when compared to SEQ ID NO: 26, 28, 34, 36, 38, 40, 42, 45, 67, or 69 (ii) a full complement of the nucleic acid sequence of (c)(i). The suppression DNA construct may comprise a cosuppression construct, antisense construct, viral-suppression construct, hairpin suppression construct, stem-loop suppression construct, double-stranded RNA-producing construct, RNAi construct, or small RNA construct (e.g., an siRNA construct or an miRNA construct).

[0176] It is understood, as those skilled in the art will appreciate, that the invention encompasses more than the specific exemplary sequences. Alterations in a nucleic acid fragment which result in the production of a chemically equivalent amino acid at a given site, but do not affect the functional properties of the encoded polypeptide, are well known in the art. For example, a codon for the amino acid alanine, a hydrophobic amino acid, may be substituted by a codon encoding another less hydrophobic residue, such as glycine, or a more hydrophobic residue, such as valine, leucine, or isoleucine. Similarly, changes which result in substitution of one negatively charged residue for another, such as aspartic acid for glutamic acid, or one positively charged residue for another, such as lysine for arginine, can also be expected to produce a functionally equivalent product. Nucleotide changes which result in alteration of the N-terminal and C-terminal portions of the polypeptide molecule would also not be expected to alter the activity of the polypeptide. Each of the proposed modifications is well within the routine skill in the art, as is determination of retention of biological activity of the encoded products.

[0177] “Suppression DNA construct” is a recombinant DNA construct which when transformed or stably integrated into the genome of the plant, results in “silencing” of a target gene in the plant. The target gene may be endogenous or transgenic to the plant. “Silencing,” as used herein with respect to the target gene, refers generally to the suppression of levels of mRNA or protein/enzyme expressed by the target gene, and/or the level of the enzyme activity or protein functionality. The term “suppression” includes lower, reduce, decline, decrease, inhibit, eliminate or prevent. “Silencing” or “gene silencing” does not specify mechanism and is inclusive, and not limited to, anti-sense, cosuppression, viral-suppression, hairpin suppression, stem-loop suppression, RNAi-based approaches, and small RNA-based approaches.

[0178] A suppression DNA construct may comprise a region derived from a target gene of interest and may comprise all or part of the nucleic acid sequence of the sense strand (or antisense strand) of the target gene of interest. Depending upon the approach to be utilized, the region may be 100% identical or less than 100% identical (e.g., at least 50%, 51%, 52%, 53%, 54%, 55%, 56%, 57%, 58%, 59%, 60%, 56%, 62%, 63%, 64%, 65%, 66%, 67%, 68%, 69%, 70%, 71%, 72%, 73%, 74%, 75%, 76%, 77%, 78%, 79%, 80%, 81%, 82%, 83%, 84%, 85%, 86%, 87%, 88%, 89%, 90%, 91%, 92%, 93%, 94%, 95%, 96%, 97%, 98%, 99% identical) to all or part of the sense strand (or antisense strand) of the gene of interest.

[0179] Suppression DNA constructs are well-known in the art, are readily constructed once the target gene of interest is selected, and include, without limitation, cosuppression constructs, antisense constructs, viral-suppression constructs, hairpin suppression constructs, stem-loop suppression constructs, double-stranded RNA-producing constructs, and more generally, RNAi (RNA interference) constructs and small RNA constructs such as sRNA (short interfering RNA) constructs and miRNA (microRNA) constructs.

[0180] “Antisense inhibition” refers to the production of antisense RNA transcripts capable of suppressing the expression of the target protein.

“Antisense RNA” refers to an RNA transcript that is complementary to all or part of a target primary transcript or mRNA and that blocks the expression of a target isolated nucleic acid fragment (U.S. Pat. No. 5,107,065). The complementarity of an antisense RNA may be with any part of the specific gene transcript, i.e., at the 5′ non-coding sequence, 3′ non-coding sequence, introns, or the coding sequence.

[0181] “Cosuppression” refers to the production of sense RNA transcripts capable of suppressing the expression of the target protein. “Sense” RNA refers to RNA transcript that includes the mRNA and can be translated into protein within a cell or in vitro. Cosuppression constructs in plants have been previously designed by focusing on overexpression of a nucleic acid sequence having homology to a native mRNA, in the sense orientation, which results in the reduction of all RNA having homology to the overexpressed sequence (see Vaucheret et al. (1998) Plant J. 16:651-659; and Gura (2000) Nature 404:804-808).

[0182] Another variation describes the use of plant viral sequences to direct the suppression of proximal mRNA encoding sequences (PCT Publication WO 98/36083 published on Aug. 20, 1998).

[0183] Previously described is the use of “hairpin” structures that incorporate all, or part, of an mRNA encoding sequence in a complementary orientation that results in a potential “stem-loop” structure for the expressed RNA (PCT Publication WO 99/53050 published on Oct. 21, 1999). In this case the stem is formed by polynucleotides corresponding to the gene of interest inserted in either sense or anti-sense orientation with respect to the promoter and the loop is formed by some polynucleotides of the gene of interest, which do not have a complement in the construct. This increases the frequency of cosuppression or silencing in the recovered transgenic plants. For review of hairpin suppression see Wesley, S. V. et al. (2003) Methods in Molecular Biology, Plant Functional Genomics: Methods and Protocols 236:273-286.

[0184] A construct where the stem is formed by at least 30 nucleotides from a gene to be suppressed and the loop is formed by a random nucleotide sequence has also effectively been used for suppression (PCT Publication No. WO 99/61632 published on Dec. 2, 1999).

[0185] The use of poly-T and poly-A sequences to generate the stem in the stem-loop structure has also been described (PCT Publication No. WO 02/00894 published Jan. 3, 2002).

[0186] Yet another variation includes using synthetic repeats to promote formation of a stem in the stem-loop structure. Transgenic organisms prepared with such recombinant DNA fragments have been shown to have reduced levels of the protein encoded by the nucleotide fragment forming the loop as described in PCT Publication No. WO 02/00904, published 3 Jan. 2002.

[0187] RNA interference refers to the process of sequence-specific post-transcriptional gene silencing in animals mediated by short interfering RNAs (siRNAs) (Fire et al., Nature 391:806 1998). The corresponding process in plants is commonly referred to as post-transcriptional gene silencing (PTGS) or RNA silencing and is also referred to as quelling in fungi. The process of post-transcriptional gene silencing is thought to be an evolutionarily-conserved cellular defense mechanism used to prevent the expression of foreign genes and is commonly shared by diverse flora and phyla (Fire et al., Trends Genet. 15:358 1999). Such protection from foreign gene expression may have evolved in response to the production of double-stranded RNAs (dsRNAs) derived from viral infection or from the random integration of transposon elements into a host genome via a cellular response that specifically destroys homologous single-stranded RNA of viral genomic RNA. The presence of dsRNA in cells triggers the RNAi response through a mechanism that has yet to be fully characterized.

[0188] The presence of long dsRNAs in cells stimulates the activity of a ribonuclease III enzyme referred to as dicer. Dicer is involved in the processing of the dsRNA into short pieces of dsRNA known as short interfering RNAs (siRNAs) (Berstein et al., Nature 409:363, 2001). Short interfering RNAs derived from dicer activity are typically about 21 to about 23 nucleotides in length and comprise about 19 base pair duplexes (Elbashir et al., Genes Dev. 15:188, 2001). Dicer has also been implicated in the excision of 21- and 22-nucleotide small temporal RNAs (stRNAs) from precursor RNA of conserved structure that are implicated in translational control (Hutvagner et al., Science 293:834, 2001). The RNAi response also features an endonuclease complex, commonly referred to as an RNA-induced silencing complex (RISC), which mediates cleavage of single-stranded RNA having sequence complementarity to the antisense strand of the sRNA duplex. Cleavage of the target RNA takes place in the middle of the region complementary to the antisense strand of the sRNA duplex (Elbashir et al., Genes Dev. 15:188, 2001). In addition, RNA interference can also involve small RNA (e.g., miRNA) mediated gene silencing, presumably through cellular mechanisms that regulate chromatin structure and thereby prevent transcription of target gene sequences (see, e.g., Allshire, Science 297:1818-1819, 2002; Volpe et al., Science 297:1833-1837, 2002; Jenuwein, Science 297:2215-2218, 2002; and Hall et al., Science 297:2232-2237, 2002). As such, miRNA molecules of the invention can be used to mediate gene silencing via interaction with RNA transcripts or alternately by interaction with particular gene sequences, wherein such interaction results in gene silencing either at the transcriptional or post-transcriptional level.

[0189] RNAi has been studied in a variety of systems. Fire et al. (Nature 391:806, 1998) were the first to observe RNAi in C. elegans. Wianny and Goetz (Nature Cell Biol. 2:70, 1999) describe RNAi mediated by dsRNA in mouse embryos. Hammond et al. (Nature 404:293, 2000) describe RNAi in Drosophila cells transfected with dsRNA. Elbashir et al., (Nature 411:494, 2001) describe RNAi induced by introduction of duplexes of synthetic 21-nucleotide RNAs in cultured mammalian cells including human embryonic kidney and HeLa cells.

[0190] Small RNAs play an important role in controlling gene expression. Regulation of many developmental processes, including flowering, is controlled by small RNAs. It is now possible to engineer changes in gene expression of plant genes by using transgenic constructs which produce small RNAs in the plant.

[0191] Small RNAs appear to function by base-pairing to complementary RNA or DNA target sequences. When bound to RNA, small RNAs trigger either RNA cleavage or translational inhibition of the target sequence. When bound to DNA target sequences, it is thought that small RNAs can mediate DNA methylation of the target sequence. The consequence of these events, regardless of the specific mechanism, is that gene expression is inhibited.

[0192] It is thought that sequence complementarity between small RNAs and their RNA targets helps to determine which mechanism, RNA cleavage or translational inhibition, is employed. It is believed that siRNAs, which are perfectly complementary with their targets, work by RNA cleavage. Some miRNAs have perfect or near-perfect complementarity with their targets, and RNA cleavage has been demonstrated for at least a few of these miRNAs. Other miRNAs have several mismatches with their targets, and apparently inhibit their targets at the translational level. Again, without being held to a particular theory on the mechanism of action, a general rule is emerging that perfect or near-perfect complementarity causes RNA cleavage, whereas translational inhibition is favored when the miRNA/target duplex contains many mismatches. The apparent exception to this is microRNA 172 (miR172) in plants. One of the targets of miR172 is APETALA2 (AP2), and although miR172 shares near-perfect complementarity with AP2 it appears to cause translational inhibition of AP2 rather than RNA cleavage.

[0193] MicroRNAs (miRNAs) are noncoding RNAs of about 19 to about 24 nucleotides (nt) in length that have been identified in both animals and plants (Lagos-Quintana et al., Science 294:853-858 2001, Lagos-Quintana et al., Curr. Biol. 12:735-739, 2002; Lau et al., Science 294:858-862, 2001; Lee and Ambros, Science 294:862-864, 2001; Llave et al., Plant Cell 14:1605-1619, 2002; Mourelatos et al., Genes. Dev. 16:720-728, 2002; Park et al., Curr. Biol. 12:1484-1495, 2002; Reinhart et al., Genes. Dev. 16:1616-1626, 2002). They are processed from longer precursor transcripts that range in size from approximately 70 to 200 nt, and these precursor transcripts have the ability to form stable hairpin structures. In animals, the enzyme involved in processing miRNA precursors is called Dicer, an RNAse III-like protein (Grishok et al., Cell 106:23-34, 2001; Hutvagner et al., Science 293:834-838, 2001; Ketting et al., Genes. Dev. 15:2654-2659, 2001). Plants also have a Dicer-like enzyme, DCL1 (previously named CARPEL FACTORY/SHORT INTEGUMENTS1/SUSPENSOR1), and recent evidence indicates that it, like Dicer, is involved in processing the hairpin precursors to generate mature miRNAs (Park et al., Curr. Biol. 12:1484-1495, 2002; Reinhart et al., Genes. Dev. 16:1616-1626, 2002). Furthermore, it is becoming clear from recent work that at least some miRNA hairpin precursors originate as longer polyadenylated transcripts, and several different miRNAs and associated hairpins can be present in a single transcript (Lagos-Quintana et al., Science 294:853-858, 2001; Lee et al., EMBO J. 21:4663-4670, 2002). Recent work has also examined the selection of the miRNA strand from the dsRNA product arising from processing of the hairpin by DICER (Schwartz, et al., Cell 115:199-208, 2003). It appears that the stability (i.e. G:C vs. A:U content, and/or mismatches) of the two ends of the processed dsRNA affects the strand selection, with the low stability end being easier to unwind by a helicase activity. The 5′ end strand at the low stability end is incorporated into the RISC complex, while the other strand is degraded.

[0194] MicroRNAs appear to regulate target genes by binding to complementary sequences located in the transcripts produced by these genes. In the case of lin-4 and let-7, the target sites are located in the 3′ UTRs of the target mRNAs (Lee et al., Cell 75:843-854, 1993; Wightman et al., Cell 75:855-862, 1993; Reinhart et al., Nature 403:901-906, 2000; Slack et al., Mol. Cell. 5:659-669, 2000), and there are several mismatches between the lin-4 and let-7 miRNAs and their target sites. Binding of the lin-4 or let-7 miRNA appears to cause downregulation of steady-state levels of the protein encoded by the target mRNA without affecting the transcript itself (Olsen and Ambros, Dev. Biol. 216:671-680, 1999). On the other hand, recent evidence suggests that miRNAs can in some cases cause specific RNA cleavage of the target transcript within the target site, and this cleavage step appears to require 100% complementarity between the miRNA and the target transcript (Hutvagner and Zamore, Science 297:2056-2060, 2002; Llave et al., Plant Cell 14:1605-1619, 2002). It seems likely that miRNAs can enter at least two pathways of target gene regulation: Protein downregulation when target complementarity is <100%, and RNA cleavage when target complementarity is 100%. MicroRNAs entering the RNA cleavage pathway are analogous to the 21-25 nt short interfering RNAs (siRNAs) generated during RNA interference (RNAi) in animals and posttranscriptional gene silencing (PTGS) in plants (Hamilton and Baulcombe 1999; Hammond et al., 2000; Zamore et al., 2000; Elbashir et al., 2001), and likely are incorporated into an RNA-induced silencing complex (RISC) that is similar or identical to that seen for RNAi.

[0195] Identifying the targets of miRNAs with bioinformatics has not been successful in animals, and this is probably due to the fact that animal miRNAs have a low degree of complementarity with their targets. On the other hand, bioinformatic approaches have been successfully used to predict targets for plant miRNAs (Llave et al., Plant Cell 14:1605-1619 2002; Park et al., Curr. Biol. 12:1484-1495 2002; Rhoades et al., Cell 110:513-520 2002), and thus it appears that plant miRNAs have higher overall complementarity with their putative targets than do animal miRNAs. Most of these predicted target transcripts of plant miRNAs encode members of transcription factor families implicated in plant developmental patterning or cell differentiation.

[0196] A recombinant DNA construct (including a suppression DNA construct) of the present invention may comprise at least one regulatory sequence.

[0197] A regulatory sequence is a promoter.

[0198] A number of promoters can be used in recombinant DNA constructs (and suppression DNA constructs) of the present invention. The promoters can be selected based on the desired outcome, and may include constitutive, tissue-specific, cell specific, inducible, or other promoters for expression in the host organism.

[0199] High level, constitutive expression of the candidate gene under control of the 35S or UBI promoter may have pleiotropic effects, although Candidate gene efficacy may be estimated when driven by a constitutive promoter.

[0200] Use of tissue-specific and/or stress-specific expression may eliminate undesirable effects but retain the ability to alter root architecture. This effect has been observed in Arabidopsis (Kasuga et al. (1999) Nature Biotechnol. 17:287-291). Suitable constitutive promoters for use in a plant host cell include, for example, the core promoter of the Rsyn7 promoter and other constitutive promoters disclosed in WO 99/43838 and U.S. Pat. No. 6,072,050; the core CaMV 35S promoter (Odell et al., Nature 313:810-812 (1985)); rice actin (McElroy et al., Plant Cell 2:163-171 (1990)); ubiquitin (UBI) (Christensen et al., Plant Mol. Biol. 12:619-632 (1989) and Christensen et al., Plant Mol. Biol. 18:675-689 (1992)); pEMU (Last et al., Theor. Appl. Genet. 81:581-588 (1991)); MAS (Velten et al., EMBO J. 3:2723-2730 (1984)); ALS promoter (U.S. Pat. No. 5,659,026), the maize GOS2 promoter (WO0020571 A2, published Apr. 1, 2000) and the like. Other constitutive promoters include, for example, those discussed in U.S. Pat. Nos. 5,608,149; 5,608,144; 5,604,121; 5,569,597; 5,466,785; 5,399,680; 5,268,463; 5,608,142; and 6,177,611.

[0201] In choosing a promoter to use in the methods of the invention, it may be desirable to use a tissue-specific or developmentally regulated promoter.

[0202] A preferred tissue-specific or developmentally regulated promoter is a DNA sequence which regulates the expression of a DNA sequence selectively in the cells/tissues of a plant critical to tassel development, seed set, or both, and limits the expression of such a DNA sequence to the period of tassel development or seed maturation in the plant. Any identifiable promoter may be used in the methods of the present invention which causes the desired temporal and spatial expression.

[0203] Promoters which are seed or embryo specific and may be useful in the invention include soybean Kunitz trysin inhibitor (Kti3, Jofuku and Goldberg, Plant Cell 1:1079-1093 (1989)), patatin (potato tubers) (Rocha-Sosa, M., et al. (1989) EMBO J. 8:23-29), convicilin, vicilin, and legumin (pea cotyledons) (Rerie, W. G., et al. (1991) Mol. Gen. Genet. 259:149-157; Newbigin, E. J., et al. (1990) Planta 180:461-470; Higgins, T. J. V., et al. (1988) Plant. Mol. Biol. 11:683-695), zein (maize endosperm) (Schemthaner, J. P., et al. (1988) EMBO J. 7:1249-1255), phaseolin (bean cotyledon) (Segupta-Gopalan, C., et al. (1985) Proc. Natl. Acad. Sci. U.S.A. 82:3320-3324), phytohemagglutinin (bean cotyledon) (Voelker, T. et al. (1987) EMBO J. 6:3571-3577), B-conglycinin and glycinin (soybean cotyledon) (Chen, Z-L, et al. (1988) EMBO J. 7:297-302), glutelin (rice endosperm), hordein (barley endosperm) (Marris, C., et al. (1988) Plant Mol. Biol. 10:359-366), glutenin and gliadin (wheat endosperm) (Colot, V., et al. (1987) EMBO J. 6:3559-3564), and sporamin (sweet potato tuberous root) (Hattori, T., et al. (1990) Plant Mol. Biol. 14:595-604). Promoters of seed-specific genes operably linked to heterologous coding regions in chimeric gene constructions maintain their temporal and spatial expression pattern in transgenic plants. Such examples include Arabidopsis thaliana 2S seed storage protein gene promoter to express enkephalin peptides in Arabidopsis and Brassica napus seeds (Vanderkerckhove et al., Bio/Technology 7:L929-932 (1989)), bean lectin and bean beta-phaseolin promoters to express luciferase (Riggs et al., Plant Sci. 63:47-57 (1989)), and wheat glutenin promoters to express chloramphenicol acetyl transferase (Colot et al., EMBO J. 6:3559-3564 (1987)).

[0204] Inducible promoters selectively express an operably linked DNA sequence in response to the presence of an endogenous or exogenous stimulus, for example by chemical compounds (chemical inducers) or in response to environmental, hormonal, chemical, and/or developmental signals. Inducible or regulated promoters include, for example, promoters regulated by light, heat, stress, flooding or drought, phytohormones, wounding, or chemicals such as ethanol, jasmonate, salicylic acid, or safeners.

[0205] Promoters that may be used in the invention include the following: 1) the stress-inducible RD29A promoter (Kasuga et al. (1999) Nature Biotechnol. 17:287-91); 2) the barley promoter, B22E; expression of B22E is specific to the pedicel in developing maize kernels (“Primary Structure of a Novel Barley Gene Differentially Expressed in Immature Aleurone Layers”. Klemsdal, S. S. et al., Mol. Gen. Genet. 228(½):9-16 (1991)); and 3) maize promoter, Zag2 (“Identification and molecular characterization of ZAG1, the maize homolog of the Arabidopsis floral homeotic gene AGAMOUS”, Schmidt, R. J. et al., Plant Cell 5(7):729-737 (1993)). “Structural characterization, chromosomal localization and phylogenetic evaluation of two pairs of AGAMOUS-like MADS-box genes from maize”, Theissen et al., Gene 156(2): 155-166 (1995); NCBI GenBank Accession No. X80206)). Zag2 transcripts can be detected 5 days prior to pollination to 7 to 8 days after pollination (DAP), and directs expression in the carpel of developing female inflorescences and Ciml which is specific to the nucleus of developing maize kernels. Ciml transcript is detected 4 to 5 days before pollination to 6 to 8 DAP. Other useful promoters include any promoter which can be derived from a gene whose expression is maternally associated with developing female florets.

[0206] Additional promoters for regulating the expression of the nucleotide sequences of the present invention in plants are vascular element specific or stalk-preferred promoters. Such stalk-preferred promoters include the alfalfa S2A promoter (GenBank Accession No. EF030816; Abrahams et al., Plant Mol. Biol. 27:513-528 (1995)) and S2B promoter (GenBank Accession No. EF030817) and the like, herein incorporated by reference.

[0207] Promoters may be derived in their entirety from a native gene, or be composed of different elements derived from different promoters found in nature, or even comprise synthetic DNA segments. It is understood by those skilled in the art that different promoters may direct the expression of a gene in different tissues or cell types, or at different stages of development, or in response to different environmental conditions. It is further recognized that since in most cases the exact boundaries of regulatory sequences have not been completely defined, DNA fragments of some variation may have identical promoter activity. Promoters that cause a gene to be expressed in most cell types at most times are commonly referred to as “constitutive promoters”. New promoters of various types useful in plant cells are constantly being discovered; numerous examples may be found in the compilation by Okamuro, J. K., and Goldberg, R. B., Biochemistry of Plants 15:1-82 (1989). (Put this with the other constitutive promoter description.)

[0208] Promoters that may be used in the invention include: RIP2, mLIP15, ZmCOR1, Rab17, CaMV 35S, RD29A, B22E, Zag2, SAM synthetase, ubiquitin (SEQ ID NO:21), CaMV 19S, nos, Adh, sucrose synthase, R-allele, root cell promoter, the vascular tissue specific promoters S2A (Genbank accession number EF030816; SEQ ID NO:22) and S2B (Genbank accession number EF030817) and the constitutive promoter GOS2 (SEQ ID NO:20) from Zea mays. Other promoters include root preferred promoters, such as the maize NAS2 promoter (SEQ ID NO:19), the maize Cyclo promoter (US 2006/0156439, published Jul. 13, 2006), the maize ROOTMET2 promoter (WO05063998, published Jul. 14, 2005), the CR1BIO promoter (WO06055487, published May 26, 2006), the CRWAQ81 (WO05035770, published Apr. 21, 2005) and the maize ZRP2.47 promoter (NCBI accession number: U38790, gi: 1063664).

[0209] A “substantial portion” of a nucleotide sequence comprises a nucleotide sequence that is sufficient to afford putative identification of the promoter that the nucleotide sequence comprises. Nucleotide sequences can be evaluated either manually, by one skilled in the art, or using computer-based sequence comparison and identification tools that employ algorithms such as BLAST (Basic Local Alignment Search Tool; Altschul et al. (1993) J. Mol. Biol. 215:403-410). In general, a sequence of thirty or more contiguous nucleotides is necessary in order to putatively identify a promoter nucleic acid sequence as homologous to a known promoter. The skilled artisan, having the benefit of the sequences as reported herein, may now use all or a substantial portion of the disclosed sequences for purposes known to those skilled in this art. Accordingly, the instant invention comprises the complete sequences as reported in the accompanying Sequence Listing, as well as substantial portions of those sequences as defined above.

[0210] Recombinant DNA constructs (and suppression DNA constructs) of the present invention may also include other regulatory sequences, including but not limited to, translation leader sequences, introns, and polyadenylation recognition sequences. In another embodiment of the present invention, a recombinant DNA construct of the present invention further comprises an enhancer or silencer.

[0211] An intron sequence can be added to the 5′ untranslated region or the coding sequence of the partial coding sequence to increase the amount of the mature message that accumulates in the cytosol. Inclusion of a spliceable intron in the transcription unit in both plant and animal expression constructs has been shown to increase gene expression at both the mRNA and protein levels up to 1000-fold. Buchman and Berg, Mol. Cell. Biol. 8:4395-4405 (1988); Callis et al., Genes Dev. 1:1183-1200 (1987). Such intron enhancement of gene expression is typically greatest when placed near the 5′ end of the transcription unit. Use of maize introns Adh1-S intron 1, 2, and 6, the Bronze-1 intron are known in the art. See generally, The Maize Handbook, Chapter 116, Freeling and Walbot, Eds., Springer, N.Y. (1994).

[0212] If polypeptide expression is desired, it is generally desirable to include a polyadenylation region at the 3′-end of a polynucleotide coding region. The polyadenylation region can be derived from the natural gene, from a variety of other plant genes, or from T-DNA. The 3′ end sequence to be added can be derived from, for example, the nopaline synthase or octopine synthase genes, or alternatively from another plant gene, or from any other eukaryotic gene.

[0213] A translation leader sequence is a DNA sequence located between the promoter sequence of a gene and the coding sequence. The translation leader sequence is present in the fully processed mRNA upstream of the translation start sequence. The translation leader sequence may affect processing of the primary transcript to mRNA, mRNA stability or translation efficiency. Examples of translation leader sequences have been described (Turner, R. and Foster, G. D. Molecular Biotechnology 3:225 (1995)).

[0214] In another embodiment of the present invention, a recombinant DNA construct of the present invention further comprises an enhancer or silencer.

[0215] Any plant can be selected for the identification of regulatory sequences and genes to be used in creating recombinant DNA constructs and suppression DNA constructs of the present invention. Examples of suitable plant targets for the isolation of genes and regulatory sequences would include but are not limited to alfalfa, apple, apricot, Arabidopsis, artichoke, arugula, asparagus, avocado, banana, barley, beans, beet, blackberry, blueberry, broccoli, brussels sprouts, cabbage, canola, cantaloupe, carrot, cassaya, castorbean, cauliflower, celery, cherry, chicory, cilantro, citrus, clementines, clover, coconut, coffee, corn, cotton, cranberry, cucumber, Douglas fir, eggplant, endive, escarole, eucalyptus, fennel, figs, garlic, gourd, grape, grapefruit, honey dew, jicama, kiwifruit, lettuce, leeks, lemon, lime, Loblolly pine, linseed, mango, melon, mushroom, nectarine, nut, oat, oil palm, oil seed rape, okra, olive, onion, orange, an ornamental plant, palm, papaya, parsley, parsnip, pea, peach, peanut, pear, pepper, persimmon, pine, pineapple, plantain, plum, pomegranate, poplar, potato, pumpkin, quince, radiata pine, radicchio, radish, rapeseed, raspberry, rice, rye, sorghum, Southern pine, soybean, spinach, squash, strawberry, sugarbeet, sugarcane, sunflower, sweet potato, sweetgum, tangerine, tea, tobacco, tomato, triticale, turf, turnip, a vine, watermelon, wheat, yams, and zucchini. Plants for the identification of regulatory sequences also include Arabidopsis, corn, wheat, soybean, and cotton.

### Compositions

[0216] A composition of the present invention is a plant comprising in its genome any of the recombinant DNA constructs (including any of the suppression DNA constructs) of the present invention (such as the constructs discussed above). Additional compositions also include any progeny of the plant, and any seed obtained from the plant or its progeny, wherein the progeny or seed comprises within its genome the recombinant DNA construct (or suppression DNA construct). Progeny includes subsequent generations obtained by self-pollination or out-crossing of a plant. Progeny also includes hybrids and inbreds.

[0217] Preferably, in hybrid seed propagated crops, mature transgenic plants can be self-pollinated to produce a homozygous inbred plant. The inbred plant produces seed containing the newly introduced recombinant DNA construct (or suppression DNA construct). These seeds can be grown to produce plants that would exhibit altered root (or plant) architecture, or used in a breeding program to produce hybrid seed, which can be grown to produce plants that would exhibit altered root (or plant) architecture. The seeds may be maize.

[0218] The plant may be a monocotyledonous or dicotyledonous plant, such as a maize or soybean plant, or a maize plant, such as a maize hybrid plant or a maize inbred plant. The plant may also be sunflower, sorghum, castor bean, grape, canola, wheat, alfalfa, cotton, rice, barley or millet.

[0219] The recombinant DNA construct may be stably integrated into the genome of the plant.

[0220] Other embodiments include but are not limited to the following preferred embodiments:

[0221] 1. A plant (for example, a maize or soybean plant) comprising in its genome a recombinant DNA construct comprising a polynucleotide operably linked to at least one regulatory sequence, wherein said polynucleotide encodes a polypeptide having an amino acid sequence of at least 50%, 51%, 52%, 53%, 54%, 55%, 56%, 57%, 58%, 59%, 60%, 56%, 62%, 63%, 64%, 65%, 66%, 67%, 68%, 69%, 70%, 71%, 72%, 73%, 74%, 75%, 76%, 77%, 78%, 79%, 80%, 81%, 82%, 83%, 84%, 85%, 86%, 87%, 88%, 89%, 90%, 91%, 92%, 93%, 94%, 95%, 96%, 97%, 98%, 99%, or 100% sequence identity, based on the Clustal V method of alignment, when compared to SEQ ID NO: 27, 29, 35, 37, 39, 41, 43, 46, 47, 48, 49, 50, 51, 52, 53, 54, 55, 56, 57, 58, 59, 68 or 70, and wherein said plant exhibits an altered root architecture when compared to a control plant not comprising said recombinant DNA construct. The plant may further exhibit an alteration of at least one agronomic characteristic when compared to the control plant.

[0222] 2. A plant (for example, a maize or soybean plant) comprising in its genome:

[0223] a recombinant DNA construct comprising:

[0224] (a) a polynucleotide operably linked to at least one regulatory element, wherein said polynucleotide encodes a polypeptide having an amino acid sequence of at least 50% sequence identity, based on the Clustal V method of alignment, when compared to SEQ ID NO: 27, 29, 35, 37, 39, 41, 43, 46, 47, 48, 49, 50, 51, 52, 53, 54, 55, 56, 57, 58, 59, 68 or 70, or

[0225] (b) a suppression DNA construct comprising at least one regulatory element operably linked to:
[0226] (i) all or part of: (A) a nucleic acid sequence encoding a polypeptide having an amino acid sequence of at least 50% sequence identity, based on the Clustal V method of alignment, when compared to SEQ ID NO: 27, 29, 35, 37, 39, 41, 43, 46, 47, 48, 49, 50, 51, 52, 53, 54, 55, 56, 57, 58, 59, 68 or 70, or (B) a full complement of the nucleic acid sequence of (b)(i)(A); or
[0227] (ii) a region derived from all or part of a sense strand or antisense strand of a target gene of interest, said region having a nucleic acid sequence of at least 50% sequence identity, based on the Clustal V method of alignment, when compared to said all or part of a sense strand or antisense strand from which said region is derived, and wherein said target gene of interest encodes a LPK polypeptide, and wherein said plant exhibits an alteration of at least one agronomic characteristic when compared to a control plant not comprising said recombinant DNA construct.

[0228] 3. A plant (for example, a maize or soybean plant) comprising in its genome a recombinant DNA construct comprising a polynucleotide operably linked to at least one regulatory sequence, wherein said polynucleotide encodes a LPK protein, and wherein said plant exhibits an altered root architecture when compared to a control plant not comprising said recombinant DNA construct. The plant may further exhibits an alteration of at least one agronomic characteristic.

[0229] The LPK protein may be from Arabidopsis thaliana, Zea mays, Glycine max, Glycine tabacina, Glycine soja or Glycine tomentella.

[0230] 4. A plant (for example, a maize or soybean plant) comprising in its genome a suppression DNA construct comprising at least one regulatory element operably linked to a region derived from all or part of a sense strand or antisense strand of a target gene of interest, said region having a nucleic acid sequence of at least 50%, 51%, 52%, 53%, 54%, 55%, 56%, 57%, 58%, 59%, 60%, 56%, 62%, 63%, 64%, 65%, 66%, 67%, 68%, 69%, 70%, 71%, 72%, 73%, 74%, 75%, 76%, 77%, 78%, 79%, 80%, 81%, 82%, 83%, 84%, 85%, 86%, 87%, 88%, 89%, 90%, 91%, 92%, 93%, 94%, 95%, 96%, 97%, 98%, 99%, or 100% sequence identity, based on the Clustal V method of alignment, when compared to said all or part of a sense strand or antisense strand from which said region is derived, and wherein said target gene of interest encodes a LPK protein, and wherein said plant exhibits an alteration of at least one agronomic characteristic when compared to a control plant not comprising said recombinant DNA construct.

[0231] 5. A plant (for example, a maize or soybean plant) comprising in its genome a suppression DNA construct comprising at least one regulatory element operably linked to all or part of (a) a nucleic acid sequence encoding a polypeptide having an amino acid sequence of at least 50%, 51%, 52%, 53%, 54%, 55%, 56%, 57%, 58%, 59%, 60%, 56%, 62%, 63%, 64%, 65%, 66%, 67%, 68%, 69%, 70%, 71%, 72%, 73%, 74%, 75%, 76%, 77%, 78%, 79%, 80%, 81%, 82%, 83%, 84%, 85%, 86%, 87%, 88%, 89%, 90%, 91%, 92%, 93%, 94%, 95%, 96%, 97%, 98%, 99%, or 100% sequence identity, based on the Clustal V method of alignment, when compared to SEQ ID NO: 27, 29, 35, 37, 39, 41, 43, 46, 47, 48, 49, 50, 51, 52, 53, 54, 55, 56, 57, 58, 59, 68 or 70, or (b) a full complement of the nucleic acid sequence of (a), and wherein said plant exhibits an alteration of at least one agronomic characteristic when compared to a control plant not comprising said recombinant DNA construct.

[0232] 6. Any progeny of the above plants in embodiments 1-5, any seeds of the above plants in embodiments 1-5, any seeds of progeny of the above plants in embodiments 1-5, and cells from any of the above plants in embodiments 1-5 and progeny thereof.

[0233] In any of the foregoing embodiments 1-6 or any other embodiments of the present invention, the recombinant DNA construct (or suppression DNA construct) may comprise at least a promoter that is functional in a plant as a regulatory sequence.

[0234] In any of the foregoing embodiments 1-6 or any other embodiments of the present invention, the alteration of at least one agronomic characteristic is either an increase or decrease.

[0235] In any of the foregoing embodiments 1-6 or any other embodiments of the present invention, the at least one agronomic characteristic may be selected from the group consisting of greenness, yield, growth rate, biomass, fresh weight at maturation, dry weight at maturation, fruit yield, seed yield, total plant nitrogen content, fruit nitrogen content, seed nitrogen content, nitrogen content in a vegetative tissue, total plant free amino acid content, fruit free amino acid content, seed free amino acid content, free amino acid content in a vegetative tissue, total plant protein content, fruit protein content, seed protein content, protein content in a vegetative tissue, drought tolerance, nitrogen uptake, root lodging, stalk lodging, plant height, ear length, ear height, harvest index, salt tolerance, early seedling vigor and seedling emergence under low temperature stress. For example, the alteration of at least one agronomic characteristic may be an increase in yield, greenness, biomass or root lodging.

[0236] In any of the foregoing preferred embodiments 1-6 or any other embodiments of the present invention, the plant may exhibit the alteration of at least one agronomic characteristic irrespective of the environmental conditions, for example, water and nutrient availability, when compared to a control plant.

[0237] One of ordinary skill in the art is familiar with protocols for determining alteration in plant root architecture. For example, transgenic maize plants can be assayed for changes in root architecture at seedling stage, flowering time or maturity. Alterations in root architecture can be determined by counting the nodal root numbers of the top 3 or 4 nodes of the greenhouse grown plants or the width of the root band. “Root band” refers to the width of the mat of roots at the bottom of a pot at plant maturity. Other measures of alterations in root architecture include, but are not limited to, the number of lateral roots, average root diameter of nodal roots, average root diameter of lateral roots, number and length of root hairs. The extent of lateral root branching (e.g. lateral root number, lateral root length) can be determined by sub-sampling a complete root system, imaging with a flat-bed scanner or a digital camera and analyzing with WinRHIZO™ software (Regent Instruments Inc.).

[0238] Data taken on root phenotype are subjected to statistical analysis, normally a t-test to compare the transgenic roots with that of non-transgenic sibling plants. One-way ANOVA may also be used in cases where multiple events and/or constructs are involved in the analysis.

[0239] The Examples below describe some representative protocols and techniques for detecting alterations in root architecture.

[0240] One can also evaluate alterations in root architecture by the ability of the plant to increase yield in field testing when compared, under the same conditions, to a control or reference plant.

[0241] One can also evaluate alterations in root architecture by the ability of the plant to maintain substantial yield (for example, at least 75%, 76%, 77%, 78%, 79%, 80%, 81%, 82%, 83%, 84%, 85%, 86%, 87%, 88%, 89%, 90%, 91%, 92%, 93%, 94%, 95%, 96%, 97%, 98%, 99%, or 100% yield) in field testing under stress conditions (e.g., nutrient over-abundance or limitation, water over-abundance or limitation, presence of disease), when compared to the yield of a control or reference plant under non-stressed conditions.

[0242] Alterations in root architecture can also be measured by determining the resistance to root lodging of the transgenic plants compared to reference or control plants.

[0243] One of ordinary skill in the art would readily recognize a suitable control or reference plant to be utilized when assessing or measuring an agronomic characteristic or phenotype of a transgenic plant in any embodiment of the present invention in which a control or reference plant is utilized (e.g., compositions or methods as described herein). For example, by way of non-limiting illustrations:

[0244] 1. Progeny of a transformed plant which is hemizygous with respect to a recombinant DNA construct (or suppression DNA construct), such that the progeny are segregating into plants either comprising or not comprising the recombinant DNA construct (or suppression DNA construct): the progeny comprising the recombinant DNA construct (or suppression DNA construct) would be typically measured relative to the progeny not comprising the recombinant DNA construct (or suppression DNA construct) (i.e., the progeny not comprising the recombinant DNA construct (or suppression DNA construct) is the control or reference plant).

[0245] 2. Introgression of a recombinant DNA construct (or suppression DNA construct) into an inbred line, such as in maize, or into a variety, such as in soybean: the introgressed line would typically be measured relative to the parent inbred or variety line (i.e., the parent inbred or variety line is the control or reference plant).

[0246] 3. Two hybrid lines, where the first hybrid line is produced from two parent inbred lines, and the second hybrid line is produced from the same two parent inbred lines except that one of the parent inbred lines contains a recombinant DNA construct (or suppression DNA construct): the second hybrid line would typically be measured relative to the first hybrid line (i.e., the parent inbred or variety line is the control or reference plant).

[0247] 4. A plant comprising a recombinant DNA construct (or suppression DNA construct): the plant may be assessed or measured relative to a control plant not comprising the recombinant DNA construct (or suppression DNA construct) but otherwise having a comparable genetic background to the plant (e.g., sharing at least 90%, 91%, 92%, 93%, 94%, 95%, 96%, 97%, 98%, 99%, or 100% sequence identity of nuclear genetic material compared to the plant comprising the recombinant DNA construct (or suppression DNA construct). There are many laboratory-based techniques available for the analysis, comparison and characterization of plant genetic backgrounds; among these are Isozyme Electrophoresis, Restriction Fragment Length Polymorphisms (RFLPs), Randomly Amplified Polymorphic DNAs (RAPDs), Arbitrarily Primed Polymerase Chain Reaction (AP-PCR), DNA Amplification Fingerprinting (DAF), Sequence Characterized Amplified Regions (SCARs), Amplified Fragment Length Polymorphisms (AFLP®s), and Simple Sequence Repeats (SSRs) which are also referred to as Microsatellites.

[0248] Furthermore, one of ordinary skill in the art would readily recognize that a suitable control or reference plant to be utilized when assessing or measuring an agronomic characteristic or phenotype of a transgenic plant would not include a plant that had been previously selected, via mutagenesis or transformation, for the desired agronomic characteristic or phenotype.

### Methods

[0249] Methods include but are not limited to methods for altering root architecture in a plant, methods for evaluating alteration of root architecture in a plant, methods for altering an agronomic characteristic in a plant, methods for determining an alteration of an agronomic characteristic in a plant, and methods for producing seed. The plant may be a monocotyledonous or dicotyledonous plant, such as a maize or soybean plant. The plant may also be sunflower, sorghum, castor bean, canola, wheat, alfalfa, cotton, rice, barley or millet. The seed may be a maize or soybean seed, or a maize hybrid seed or maize inbred seed.

[0250] Additional methods include but are not limited to the following:

[0251] A method of altering root architecture of a plant, comprising: (a) introducing into a regenerable plant cell a recombinant DNA construct comprising a polynucleotide operably linked to at least one regulatory sequence (such as a promoter functional in a plant), wherein the polynucleotide encodes a polypeptide having an amino acid sequence of at least 50%, 51′)/0, 52%, 53%, 54%, 55%, 56%, 57%, 58%, 59%, 60%, 56%, 62%, 63%, 64%, 65%, 66%, 67%, 68%, 69%, 70%, 71%, 72%, 73%, 74%, 75%, 76%, 77%, 78%, 79%, 80%, 81%, 82%, 83%, 84%, 85%, 86%, 87%, 88%, 89%, 90%, 91%, 92%, 93%, 94%, 95%, 96%, 97%, 98%, 99%, or 100% sequence identity, based on the Clustal V method of alignment, when compared to SEQ ID NO: 27, 29, 35, 37, 39, 41, 43, 46, 47, 48, 49, 50, 51, 52, 53, 54, 55, 56, 57, 58, 59, 68 or 70; and (b) regenerating a transgenic plant from the regenerable plant cell after step (a), wherein the transgenic plant comprises in its genome the recombinant DNA construct and exhibits altered root architecture when compared to a control plant not comprising the recombinant DNA construct. The method may further comprise (c) obtaining a progeny plant derived from the transgenic plant, wherein said progeny plant comprises in its genome the recombinant DNA construct and exhibits altered root architecture when compared to a control plant not comprising the recombinant DNA construct.

[0252] A method of altering root architecture in a plant, comprising: (a) introducing into a regenerable plant cell a suppression DNA construct comprising at least one regulatory sequence (such as a promoter functional in a plant) operably linked to:

[0253] (i) all or part of: (A) a nucleic acid sequence encoding a polypeptide having an amino acid sequence of at least 50%, 51%, 52%, 53%, 54%, 55%, 56%, 57%, 58%, 59%, 60%, 56%, 62%, 63%, 64%, 65%, 66%, 67%, 68%, 69%, 70%, 71%, 72%, 73%, 74%, 75%, 76%, 77%, 78%, 79%, 80%, 81%, 82%, 83%, 84%, 85%, 86%, 87%, 88%, 89%, 90%, 91%, 92%, 93%, 94%, 95%, 96%, 97%, 98%, 99%, or 100% sequence identity, based on the Clustal V method of alignment, when compared to SEQ ID NO: 27, 29, 35, 37, 39, 41, 43, 46, 47, 48, 49, 50, 51, 52, 53, 54, 55, 56, 57, 58, 59, 68 or 70, or (B) a full complement of the nucleic acid sequence of (a)(i)(A); or

[0254] (ii) a region derived from all or part of a sense strand or antisense strand of a target gene of interest, said region having a nucleic acid sequence of at least 50%, 51%, 52%, 53%, 54%, 55%, 56%, 57%, 58%, 59%, 60%, 56%, 62%, 63%, 64%, 65%, 66%, 67%, 68%, 69%, 70%, 71%, 72%, 73%, 74%, 75%, 76%, 77%, 78%, 79%, 80%, 81%, 82%, 83%, 84%, 85%, 86%, 87%, 88%, 89%, 90%, 91%, 92%, 93%, 94%, 95%, 96%, 97%, 98%, 99%, or 100% sequence identity, based on the Clustal V method of alignment, when compared to said all or part of a sense strand or antisense strand from which said region is derived, and wherein said target gene of interest encodes a LPK polypeptide; and

[0255] (b) regenerating a transgenic plant from the regenerable plant cell after step (a), wherein the transgenic plant comprises in its genome the recombinant DNA construct and exhibits an altered root architecture when compared to a control plant not comprising the suppression DNA construct. The method may further comprise (c) obtaining a progeny plant derived from the transgenic plant, wherein said progeny plant comprises in its genome the recombinant DNA construct and exhibits altered root architecture when compared to a control plant not comprising the suppression DNA construct.

[0256] A method of evaluating altered root architecture in a plant, comprising (a) introducing into a regenerable plant cell a recombinant DNA construct comprising a polynucleotide operably linked to at least on regulatory sequence (such as a promoter functional in a plant), wherein the polynucleotide encodes a polypeptide having an amino acid sequence of at least 50%, 51%, 52%, 53%, 54%, 55%, 56%, 57%, 58%, 59%, 60%, 56%, 62%, 63%, 64%, 65%, 66%, 67%, 68%, 69%, 70%, 71%, 72%, 73%, 74%, 75%, 76%, 77%, 78%, 79%, 80%, 81%, 82%, 83%, 84%, 85%, 86%, 87%, 88%, 89%, 90%, 91%, 92%, 93%, 94%, 95%, 96%, 97%, 98%, 99%, or 100% sequence identity, based on the Clustal V method of alignment, when compared to SEQ ID NO: 27, 29, 35, 37, 39, 41, 43, 46, 47, 48, 49, 50, 51, 52, 53, 54, 55, 56, 57, 58, 59, 68 or 70, or (b) regenerating a transgenic plant from the regenerable plant cell after step (a), wherein the transgenic plant comprises in its genome the recombinant DNA construct; and (c) evaluating root architecture of the transgenic plant compared to a control plant not comprising the recombinant DNA construct. The method may further comprise (d) obtaining a progeny plant derived from the transgenic plant, wherein the progeny plant comprises in its genome the recombinant DNA construct; and (e) evaluating root architecture of the progeny plant compared to a control plant not comprising the recombinant DNA construct.

[0257] A method of evaluating altered root architecture in a plant, comprising (a) introducing into a regenerable plant cell a suppression DNA construct comprising at least one regulatory sequence (such as a promoter functional in a plant) operably linked to:

[0258] (i) all or part of: (A) a nucleic acid sequence encoding a polypeptide having an amino acid sequence of at least 50%, 51%, 52%, 53%, 54%, 55%, 56%, 57%, 58%, 59%, 60%, 56%, 62%, 63%, 64%, 65%, 66%, 67%, 68%, 69%, 70%, 71%, 72%, 73%, 74%, 75%, 76%, 77%, 78%, 79%, 80%, 81%, 82%, 83%, 84%, 85%, 86%, 87%, 88%, 89%, 90%, 91%, 92%, 93%, 94%, 95%, 96%, 97%, 98%, 99%, or 100% sequence identity, based on the Clustal V method of alignment, when compared to SEQ ID NO: 27, 29, 35, 37, 39, 41, 43, 46, 47, 48, 49, 50, 51, 52, 53, 54, 55, 56, 57, 58, 59, 68 or 70, or (B) a full complement of the nucleic acid sequence of (a)(i)(A); or (ii) a region derived from all or part of a sense strand or antisense strand of a target gene of interest, said region having a nucleic acid sequence of at least 50%, 51%, 52%, 53%, 54%, 55%, 56%, 57%, 58%, 59%, 60%, 56%, 62%, 63%, 64%, 65%, 66%, 67%, 68%, 69%, 70%, 71%, 72%, 73%, 74%, 75%, 76%, 77%, 78%, 79%, 80%, 81%, 82%, 83%, 84%, 85%, 86%, 87%, 88%, 89%, 90%, 91%, 92%, 93%, 94%, 95%, 96%, 97%, 98%, 99%, or 100% sequence identity, based on the Clustal V method of alignment, when compared to said all or part of a sense strand or antisense strand from which said region is derived, and wherein said target gene of interest encodes a LPK polypeptide; and

[0259] (b) regenerating a transgenic plant from the regenerable plant cell after step (a), wherein the transgenic plant comprises in its genome the suppression DNA construct; and (c) evaluating the transgenic plant for altered root architecture compared to a control plant not comprising the suppression DNA construct. The method may further comprise (d) obtaining a progeny plant derived from the transgenic plant, wherein the progeny plant comprises in its genome the suppression DNA construct; and (e) evaluating the progeny plant for altered root architecture compared to a control plant not comprising the suppression DNA construct.

[0260] A method of evaluating altered root architecture in a plant, comprising (a) introducing into a regenerable plant cell a recombinant DNA construct comprising a polynucleotide operably linked to at least one regulatory sequence (such as a promoter functional in a plant), wherein said polynucleotide encodes a polypeptide having an amino acid sequence of at least 50%, 51%, 52%, 53%, 54%, 55%, 56%, 57%, 58%, 59%, 60%, 56%, 62%, 63%, 64%, 65%, 66%, 67%, 68%, 69%, 70%, 71%, 72%, 73%, 74%, 75%, 76%, 77%, 78%, 79%, 80%, 81%, 82%, 83%, 84%, 85%, 86%, 87%, 88%, 89%, 90%, 91%, 92%, 93%, 94%, 95%, 96%, 97%, 98%, 99%, or 100% sequence identity, based on the Clustal V method of alignment, when compared to SEQ ID NO 27, 29, 35, 37, 39, 41, 43, 46, 47, 48, 49, 50, 51, 52, 53, 54, 55, 56, 57, 58, 59, 68 or 70 (b) regenerating a transgenic plant from the regenerable plant cell after step (a), wherein the transgenic plant comprises in its genome the recombinant DNA construct; (c) obtaining a progeny plant derived from said transgenic plant, wherein the progeny plant comprises in its genome the recombinant DNA construct; and (d) evaluating the progeny plant for altered root architecture compared to a control plant not comprising the recombinant DNA construct.

[0261] A method of evaluating root architecture in a plant, comprising:

(a) introducing into a regenerable plant cell a suppression DNA construct comprising at least one regulatory element operably linked to: (i) all or part of: (A) a nucleic acid sequence encoding a polypeptide having an amino acid sequence of at least 50%, 51%, 52%, 53%, 54%, 55%, 56%, 57%, 58%, 59%, 60%, 56%, 62%, 63%, 64%, 65%, 66%, 67%, 68%, 69%, 70%, 71%, 72%, 73%, 74%, 75%, 76%, 77%, 78%, 79%, 80%, 81%, 82%, 83%, 84%, 85%, 86%, 87%, 88%, 89%, 90%, 91%, 92%, 93%, 94%, 95%, 96%, 97%, 98%, 99%, or 100% sequence identity, based on the Clustal V method of alignment, when compared to SEQ ID NO: 27, 29, 35, 37, 39, 41, 43, 46, 47, 48, 49, 50, 51, 52, 53, 54, 55, 56, 57, 58, 59, 68 or 70, or (B) a full complement of the nucleic acid sequence of (a)(i)(A); or (ii) a region derived from all or part of a sense strand or antisense strand of a target gene of interest, said region having a nucleic acid sequence of at least 50%, 51%, 52%, 53%, 54%, 55%, 56%, 57%, 58%, 59%, 60%, 56%, 62%, 63%, 64%, 65%, 66%, 67%, 68%, 69%, 70%, 71%, 72%, 73%, 74%, 75%, 76%, 77%, 78%, 79%, 80%, 81%, 82%, 83%, 84%, 85%, 86%, 87%, 88%, 89%, 90%, 91%, 92%, 93%, 94%, 95%, 96%, 97%, 98%, 99%, or 100% sequence identity, based on the Clustal V method of alignment, when compared to said all or part of a sense strand or antisense strand from which said region is derived, and wherein said target gene of interest encodes a LPK or polypeptide; (b) regenerating a transgenic plant from the regenerable plant cell after step (a), wherein the transgenic plant comprises in its genome the suppression DNA construct;
(c) obtaining a progeny plant derived from the transgenic plant, wherein the progeny plant comprises in its genome the suppression DNA construct; and (d) evaluating root architecture of the progeny plant compared to a control plant not comprising the suppression DNA construct.

[0262] A method of determining an alteration of an agronomic characteristic in a plant, comprising (a) introducing into a regenerable plant cell a recombinant DNA construct comprising a polynucleotide operably linked to at least on regulatory sequence (such as a promoter functional in a plant), wherein said polynucleotide encodes a polypeptide having an amino acid sequence of at least 50%, 51%, 52%, 53%, 54%, 55%, 56%, 57%, 58%, 59%, 60%, 56%, 62%, 63%, 64%, 65%, 66%, 67%, 68%, 69%, 70%, 71%, 72%, 73%, 74%, 75%, 76%, 77%, 78%, 79%, 80%, 81%, 82%, 83%, 84%, 85%, 86%, 87%, 88%, 89%, 90%, 91%, 92%, 93%, 94%, 95%, 96%, 97%, 98%, 99%, or 100% sequence identity, based on the Clustal V method of alignment, when compared to SEQ ID NO: 27, 29, 35, 37, 39, 41, 43, 46, 47, 48, 49, 50, 51, 52, 53, 54, 55, 56, 57, 58, 59, 68 or 70 (b) regenerating a transgenic plant from the regenerable plant cell after step (a), wherein the transgenic plant comprises in its genome said recombinant DNA construct; and (c) determining whether the transgenic plant exhibits an alteration of at least one agronomic characteristic when compared to a control plant not comprising the recombinant DNA construct. The method may further comprise (d) obtaining a progeny plant derived from the transgenic plant, wherein the progeny plant comprises in its genome the recombinant DNA construct; and (e) determining whether the progeny plant exhibits an alteration of at least one agronomic characteristic when compared to a control plant not comprising the recombinant DNA construct.

[0263] A method of determining an alteration of an agronomic characteristic in a plant, comprising (a) introducing into a regenerable plant cell a suppression DNA construct comprising at least one regulatory sequence (such as a promoter functional in a plant) operably linked to all or part of (i) a nucleic acid sequence encoding a polypeptide having an amino acid sequence of at least 50%, 51%, 52%, 53%, 54%, 55%, 56%, 57%, 58%, 59%, 60%, 56%, 62%, 63%, 64%, 65%, 66%, 67%, 68%, 69%, 70%, 71%, 72%, 73%, 74%, 75%, 76%, 77%, 78%, 79%, 80%, 81%, 82%, 83%, 84%, 85%, 86%, 87%, 88%, 89%, 90%, 91%, 92%, 93%, 94%, 95%, 96%, 97%, 98%, 99%, or 100% sequence identity, based on the Clustal V method of alignment, when compared to SEQ ID NO: 27, 29, 35, 37, 39, 41, 43, 46, 47, 48, 49, 50, 51, 52, 53, 54, 55, 56, 57, 58, 59, 68 or 70, or (ii) a full complement of the nucleic acid sequence of (i); (b) regenerating a transgenic plant from the regenerable plant cell after step (a), wherein the transgenic plant comprises in its genome the suppression DNA construct; and (c) determining whether the transgenic plant exhibits an alteration in at least one agronomic characteristic when compared to a control plant not comprising the suppression DNA construct. The method may further comprise (d) obtaining a progeny plant derived from the transgenic plant, wherein the progeny plant comprises in its genome the suppression DNA construct; and (e) determining whether the progeny plant exhibits an alteration in at least one agronomic characteristic when compared to a control plant not comprising the suppression DNA construct.

[0264] A method of determining an alteration of an agronomic characteristic in a plant, comprising (a) introducing into a regenerable plant cell a recombinant DNA construct comprising a polynucleotide operably linked to at least one regulatory sequence (such as a promoter functional in a plant), wherein said polynucleotide encodes a polypeptide having an amino acid sequence of at least 50%, 51%, 52%, 53%, 54%, 55%, 56%, 57%, 58%, 59%, 60%, 56%, 62%, 63%, 64%, 65%, 66%, 67%, 68%, 69%, 70%, 71%, 72%, 73%, 74%, 75%, 76%, 77%, 78%, 79%, 80%, 81%, 82%, 83%, 84%, 85%, 86%, 87%, 88%, 89%, 90%, 91%, 92%, 93%, 94%, 95%, 96%, 97%, 98%, 99%, or 100% sequence identity, based on the Clustal V method of alignment, when compared to SEQ ID NO: 27, 29, 35, 37, 39, 41, 43, 46, 47, 48, 49, 50, 51, 52, 53, 54, 55, 56, 57, 58, 59, 68 or 70 (b) regenerating a transgenic plant from the regenerable plant cell after step (a), wherein the transgenic plant comprises in its genome said recombinant DNA construct; (c) obtaining a progeny plant derived from said transgenic plant, wherein the progeny plant comprises in its genome the recombinant DNA construct; and (d) determining whether the progeny plant exhibits an alteration of at least one agronomic characteristic when compared to a control plant not comprising the recombinant DNA construct. The method of determining an alteration of an agronomic characteristic in a plant may further comprise determining whether the transgenic plant exhibits an alteration of at least one agronomic characteristic when compared, under varying environmental conditions, to a control plant not comprising the recombinant DNA construct.

[0265] A method of determining an alteration of an agronomic characteristic in a plant, comprising (a) introducing into a regenerable plant cell a suppression DNA construct comprising at least one regulatory sequence (such as a promoter functional in a plant) operably linked to all or part of (i) a nucleic acid sequence encoding a polypeptide having an amino acid sequence of at least 50%, 51%, 52%, 53%, 54%, 55%, 56%, 57%, 58%, 59%, 60%, 56%, 62%, 63%, 64%, 65%, 66%, 67%, 68%, 69%, 70%, 71%, 72%, 73%, 74%, 75%, 76%, 77%, 78%, 79%, 80%, 81%, 82%, 83%, 84%, 85%, 86%, 87%, 88%, 89%, 90%, 91%, 92%, 93%, 94%, 95%, 96%, 97%, 98%, 99%, or 100% sequence identity, based on the Clustal V method of alignment, when compared to SEQ ID NO: 27, 29, 35, 37, 39, 41, 43, 46, 47, 48, 49, 50, 51, 52, 53, 54, 55, 56, 57, 58, 59, 68 or 70, or (ii) a full complement of the nucleic acid sequence of (i);

[0266] (b) regenerating a transgenic plant from the regenerable plant cell after step (a), wherein the transgenic plant comprises in its genome the suppression DNA construct; (c) obtaining a progeny plant derived from said transgenic plant, wherein the progeny plant comprises in its genome the suppression DNA construct; and (d) determining whether the progeny plant exhibits an alteration in at least one agronomic characteristic when compared to a control plant not comprising the recombinant DNA construct.

[0267] A method of determining an alteration of an agronomic characteristic in a plant, comprising: (a) introducing into a regenerable plant cell a suppression DNA construct comprising at least one regulatory element operably linked to a region derived from all or part of a sense strand or antisense strand of a target gene of interest, said region having a nucleic acid sequence of at least 50%, 51%, 52%, 53%, 54%, 55%, 56%, 57%, 58%, 59%, 60%, 56%, 62%, 63%, 64%, 65%, 66%, 67%, 68%, 69%, 70%, 71%, 72%, 73%, 74%, 75%, 76%, 77%, 78%, 79%, 80%, 81%, 82%, 83%, 84%, 85%, 86%, 87%, 88%, 89%, 90%, 91%, 92%, 93%, 94%, 95%, 96%, 97%, 98%, 99%, or 100% sequence identity, based on the Clustal V method of alignment, when compared to said all or part of a sense strand or antisense strand from which said region is derived, and wherein said target gene of interest encodes a LPK polypeptide; (b) regenerating a transgenic plant from the regenerable plant cell after step (a), wherein the transgenic plant comprises in its genome the suppression DNA construct; and (c) determining whether the transgenic plant exhibits an alteration of at least one agronomic characteristic when compared to a control plant not comprising the suppression DNA construct. The method may further comprise: (d) obtaining a progeny plant derived from the transgenic plant, wherein the progeny plant comprises in its genome the suppression DNA construct; and (e) determining whether the progeny plant exhibits an alteration of at least one agronomic characteristic when compared to a control plant not comprising the suppression DNA construct.

[0268] A method of determining an alteration of an agronomic characteristic in a plant, comprising: (a) introducing into a regenerable plant cell a suppression DNA construct comprising at least one regulatory element operably linked to a region derived from all or part of a sense strand or antisense strand of a target gene of interest, said region having a nucleic acid sequence of at least 50%, 51%, 52%, 53%, 54%, 55%, 56%, 57%, 58%, 59%, 60%, 56%, 62%, 63%, 64%, 65%, 66%, 67%, 68%, 69%, 70%, 71%, 72%, 73%, 74%, 75%, 76%, 77%, 78%, 79%, 80%, 81%, 82%, 83%, 84%, 85%, 86%, 87%, 88%, 89%, 90%, 91%, 92%, 93%, 94%, 95%, 96%, 97%, 98%, 99%, or 100% sequence identity, based on the Clustal V method of alignment, when compared to said all or part of a sense strand or antisense strand from which said region is derived, and wherein said target gene of interest encodes a LPK polypeptide; (b) regenerating a transgenic plant from the regenerable plant cell after step (a), wherein the transgenic plant comprises in its genome the suppression DNA construct; (c) obtaining a progeny plant derived from the transgenic plant, wherein the progeny plant comprises in its genome the suppression DNA construct; and (d) determining whether the progeny plant exhibits an alteration of at least one agronomic characteristic when compared to a control plant not comprising the suppression DNA construct.

[0269] A method of producing seed (such as seed that can be sold as a product offering with altered root architecture) comprising any of the preceding methods, and further comprising obtaining seeds from said progeny plant, wherein said seeds comprise in their genome said recombinant DNA construct (or suppression DNA construct).

[0270] In any of the foregoing methods or any other embodiments of methods of the present invention, the step of determining an alteration of an agronomic characteristic in a transgenic plant, if applicable, may comprise determining whether the transgenic plant exhibits an alteration of at least one agronomic characteristic when compared, under varying environmental conditions, to a control plant not comprising the recombinant DNA construct.

[0271] In any of the foregoing methods or any other embodiments of methods of the present invention, the step of determining an alteration of an agronomic characteristic in a progeny plant, if applicable, may comprise determining whether the progeny plant exhibits an alteration of at least one agronomic characteristic when compared, under varying environmental conditions, to a control plant not comprising the recombinant DNA construct.

[0272] In any of the preceding methods or any other embodiments of methods of the present invention, in said introducing step said regenerable plant cell may comprise a callus cell (for example an embryogenic callus cell), a gametic cell, a meristematic cell, or a cell of an immature embryo. The regenerable plant cells may be from an inbred maize plant.

[0273] In any of the preceding methods or any other embodiments of methods of the present invention, said regenerating step may comprise: (i) culturing said transformed plant cells in a media comprising an embryogenic promoting hormone until callus organization is observed; (ii) transferring said transformed plant cells of step (i) to a first media which includes a tissue organization promoting hormone; and (iii) subculturing said transformed plant cells after step (ii) onto a second media, to allow for shoot elongation, root development or both.

[0274] In any of the preceding methods or any other embodiments of methods of the present invention, alternatives exist for introducing into a regenerable plant cell a recombinant DNA construct comprising a polynucleotide operably linked to at least one regulatory sequence. For example, one may introduce into a regenerable plant cell a regulatory sequence (such as one or more enhancers, for example as part of a transposable element), and then screen for an event in which the regulatory sequence is operably linked to an endogenous gene encoding a polypeptide of the instant invention.

[0275] The introduction of recombinant DNA constructs of the present invention into plants may be carried out by any suitable technique, including but not limited to direct DNA uptake, chemical treatment, electroporation, microinjection, cell fusion, infection, vector mediated DNA transfer, bombardment, or Agrobacterium-mediated transformation. Techniques for plant transformation and regeneration have been described in International Patent Publication WO 2009/006276, the contents of which are herein incorporated by reference.

[0276] In any of the preceding methods or any other embodiments of methods of the present invention, the at least one agronomic characteristic may be selected from the group consisting of greenness, yield, growth rate, biomass, fresh weight at maturation, dry weight at maturation, fruit yield, seed yield, total plant nitrogen content, fruit nitrogen content, seed nitrogen content, whole plant free amino acid content, fruit free amino acid content, seed free amino acid content, fruit protein content, seed protein content, protein content in a vegetative tissue, drought tolerance, nitrogen uptake, root lodging, harvest index, stalk lodging, plant height, ear height, ear length, early seedling vigor and seedling emergence under low temperature stress. The increase may be in yield, greenness, biomass or root lodging.

[0277] In any of the preceding methods or any other embodiments of methods of the present invention, the plant may exhibit the alteration of at least one agronomic characteristic irrespective of the environmental conditions when compared to a control.

[0278] The introduction of recombinant DNA constructs of the present invention into plants may be carried out by any suitable technique, including but not limited to direct DNA uptake, chemical treatment, electroporation, microinjection, cell fusion, infection, vector mediated DNA transfer, bombardment, or Agrobacterium mediated transformation.

[0279] Techniques for transformation of maize plant cells and soybean plant cells are set forth in the Examples below.

[0280] Other include methods for transforming dicots, primarily by use of Agrobacterium tumefaciens, and obtaining transgenic plants include those published for cotton (U.S. Pat. No. 5,004,863, U.S. Pat. No. 5,159,135, U.S. Pat. No. 5,518,908); soybean (U.S. Pat. No. 5,569,834, U.S. Pat. No. 5,416,011, McCabe et. al., Bio/Technology 6:923 (1988), Christou et al., Plant Physiol. 87:671 674 (1988)); Brassica (U.S. Pat. No. 5,463,174); peanut (Cheng et al., Plant Cell Rep. 15:653 657 (1996), McKently et al., Plant Cell Rep. 14:699 703 (1995)); papaya; and pea (Grant et al., Plant Cell Rep. 15:254 258, (1995)).

[0281] Transformation of monocotyledons using electroporation, particle bombardment, and Agrobacterium have also been reported and are included as methods for use in the invention, for example, transformation and plant regeneration as achieved in asparagus (Bytebier et al., Proc. Natl. Acad. Sci. U.S.A. 84:5354, (1987)); barley (Wan and Lemaux, Plant Physiol. 104:37 (1994)); Zea mays (Rhodes et al., Science 240:204 (1988), Gordon-Kamm et al., Plant Cell 2:603 618 (1990), Fromm et al., Bio/Technology 8:833 (1990), Koziel et al., Bio/Technology 11:194, (1993), Armstrong et al., Crop Science 35:550-557 (1995)); oat (Somers et al., Bio/Technology 10:1589 (1992)); orchard grass (Horn et al., Plant Cell Rep. 7:469 (1988)); rice (Toriyama et al., Theor. Appl. Genet. 205:34, (1986); Part et al., Plant Mol. Biol. 32:1135 1148, (1996); Abedinia et al., Aust. J. Plant Physiol. 24:133 141 (1997); Zhang and Wu, Theor. Appl. Genet. 76:835 (1988); Zhang et al., Plant Cell Rep. 7:379, (1988); Battraw and Hall, Plant Sci. 86:191 202 (1992); Christou et al., Bio/Technology 9:957 (1991)); rye (De la Pena et al., Nature 325:274 (1987)); sugarcane (Bower and Birch, Plant J. 2:409 (1992)); tall fescue (Wang et al., Bio/Technology 10:691 (1992)), and wheat (Vasil et al., Bio/Technology 10:667 (1992); U.S. Pat. No. 5,631,152).

[0282] There are a variety of methods for the regeneration of plants from plant tissue. The particular method of regeneration will depend on the starting plant tissue and the particular plant species to be regenerated.

[0283] The regeneration, development, and cultivation of plants from single plant protoplast transformants or from various transformed explants is well known in the art (Weissbach and Weissbach, In: Methods for Plant Molecular Biology, (Eds.), Academic Press, Inc. San Diego, Calif., (1988)). This regeneration and growth process typically includes the steps of selection of transformed cells, culturing those individualized cells through the usual stages of embryonic development through the rooted plantlet stage. Transgenic embryos and seeds are similarly regenerated. The resulting transgenic rooted shoots are thereafter planted in an appropriate plant growth medium such as soil.

[0284] The development or regeneration of plants containing the foreign, exogenous isolated nucleic acid fragment that encodes a protein of interest is well known in the art. The regenerated plants may be self-pollinated to provide homozygous transgenic plants. Otherwise, pollen obtained from the regenerated plants is crossed to seed-grown plants of agronomically important lines. Conversely, pollen from plants of these important lines is used to pollinate regenerated plants. A transgenic plant of the present invention containing a desired polypeptide is cultivated using methods well known to one skilled in the art.

In another aspect, this invention also concerns a method of mapping genetic variations related to altering root architecture and/or altering at least one agronomic characteristic in plants comprising:

[0285] (a) crossing two plant varieties; and

[0286] (b) evaluating genetic variations with respect to:
[0287] (i) a nucleic acid sequence selected from the group consisting of SEQ ID NO: 24, 26, 28, 30, 32, 34, 36, 38, 67, or 69; or
[0288] (ii) a nucleic acid sequence encoding a polypeptide selected from the group consisting of SEQ ID NO: 25, 27, 29, 31, 33, 40, 41, 68, or 70 in progeny plants resulting from the cross of step (a) wherein the evaluation is made using a method selected from the group consisting of: RFLP analysis, SNP analysis, and PCR-based analysis.

[0289] In another embodiment, this invention concerns a method of molecular breeding to obtain an altered root architecture and/or at least one altered agronomic characteristic in plants comprising:

[0290] (a) crossing two plant varieties; and

[0291] (b) evaluating genetic variations with respect to:
[0292] (i) a nucleic acid sequence selected from the group consisting of SEQ ID NO: 24, 26, 28, 30, 32, 34, 36, 38, 67, or 69; or
[0293] (ii) a nucleic acid sequence encoding a polypeptide selected from the group consisting of SEQ ID NO: 25, 27, 29, 31, 33, 40, 41, 68, or 70;
   in progeny plants resulting from the cross of step (a) wherein the evaluation is made using a method selected from the group consisting of: RFLP analysis, SNP analysis, and PCR-based analysis.

[0294] The terms “mapping genetic variation” or “mapping genetic variability” are used interchangeably and define the process of identifying changes in DNA sequence, whether from natural or induced causes, within a genetic region that differentiates between different plant lines, cultivars, varieties, families, or species. The genetic variability at a particular locus (gene) due to even minor base changes can alter the pattern of restriction enzyme digestion fragments that can be generated. Pathogenic alterations to the genotype can be due to deletions or insertions within the gene being analyzed or even single nucleotide substitutions that can create or delete a restriction enzyme recognition site. RFLP analysis takes advantage of this and utilizes Southern blotting with a probe corresponding to the isolated nucleic acid fragment of interest.

[0295] Thus, if a polymorphism (i.e., a commonly occurring variation in a gene or segment of DNA; also, the existence of several forms of a gene (alleles) in the same species) creates or destroys a restriction endonuclease cleavage site, or if it results in the loss or insertion of DNA (e.g., a variable nucleotide tandem repeat (VNTR) polymorphism), it will alter the size or profile of the DNA fragments that are generated by digestion with that restriction endonuclease. As such, individuals that possess a variant sequence can be distinguished from those having the original sequence by restriction fragment analysis. Polymorphisms that can be identified in this manner are termed “restriction fragment length polymorphisms: (“RFLPs”). RFLPs have been widely used in human and plant genetic analyses (Glassberg, UK Patent Application 2135774; Skolnick et al, Cytogen. Cell Genet. 32:58-67 (1982); Botstein et al, Ann. J. Hum. Genet. 32:314-331 (1980); Fischer et al (PCT Application WO 90/13668; Uhlen, PCT Application WO 90/11369).

[0296] A central attribute of “single nucleotide polymorphisms” or “SNPs” is that the site of the polymorphism is at a single nucleotide. SNPs have certain reported advantages over RFLPs or VNTRs. First, SNPs are more stable than other classes of polymorphisms. Their spontaneous mutation rate is approximately 10⁻⁹ (Kornberg, DNA Replication, W.H. Freeman & Co., San Francisco, 1980), approximately, 1,000 times less frequent than VNTRs (U.S. Pat. No. 5,679,524). Second, SNPs occur at greater frequency, and with greater uniformity than RFLPs and VNTRs. As SNPs result from sequence variation, new polymorphisms can be identified by sequencing random genomic or cDNA molecules. SNPs can also result from deletions, point mutations and insertions. Any single base alteration, whatever the cause, can be a SNP. The greater frequency of SNPs means that they can be more readily identified than the other classes of polymorphisms.

[0297] SNPs can be characterized using any of a variety of methods. Such methods include the direct or indirect sequencing of the site, the use of restriction enzymes where the respective alleles of the site create or destroy a restriction site, the use of allele-specific hybridization probes, the use of antibodies that are specific for the proteins encoded by the different alleles of the polymorphism or by other biochemical interpretation. SNPs can be sequenced by a number of methods. Two basic methods may be used for DNA sequencing, the chain termination method of Sanger et al, Proc. Natl. Acad. Sci. (U.S.A.) 74:5463-5467 (1977), and the chemical degradation method of Maxam and Gilbert, Proc. Natl. Acad. Sci. (U.S.A.) 74: 560-564 (1977).

[0298] Furthermore, single point mutations can be detected by modified PCR techniques such as the ligase chain reaction (“LCR”) and PCR-single strand conformational polymorphisms (“PCR-SSCP”) analysis. The PCR technique can also be used to identify the level of expression of genes in extremely small samples of material, e.g., tissues or cells from a body. The technique is termed reverse transcription-PCR (“RT-PCR”).

[0299] The term “molecular breeding” defines the process of tracking molecular markers during the breeding process. It is common for the molecular markers to be linked to phenotypic traits that are desirable. By following the segregation of the molecular marker or genetic trait, instead of scoring for a phenotype, the breeding process can be accelerated by growing fewer plants and eliminating assaying or visual inspection for phenotypic variation. The molecular markers useful in this process include, but are not limited to, any marker useful in identifying mapable genetic variations previously mentioned, as well as any closely linked genes that display synteny across plant species. The term “synteny” refers to the conservation of gene placement/order on chromosomes between different organisms. This means that two or more genetic loci, that may or may not be closely linked, are found on the same chromosome among different species. Another term for synteny is “genome colinearity”.

### Examples

[0300] The present invention is further illustrated in the following Examples, in which parts and percentages are by weight and degrees are Celsius, unless otherwise stated. It should be understood that these Examples are given by way of illustration only. From the above discussion and these Examples, one skilled in the art can ascertain the essential characteristics of this invention, and without departing from the spirit and scope thereof, can make various changes and modifications of the invention to adapt it to various usages and conditions. Thus, various modifications of the invention in addition to those shown and described herein will be apparent to those skilled in the art from the foregoing description. Such modifications are also intended to fall within the scope of the appended claims.

### Example 1

### Creation of an Arabidopsis Population with Activation-Tagged Genes

[0301] A 18.4 kb T-DNA based binary construct was created, pHSbarENDs2 (FIG. 1; SEQ ID NO:1;) containing four multimerized enhancer elements derived from the Cauliflower Mosaic Virus 35S promoter, corresponding to sequences −341 to −64, as defined by Odell et al. (1985) Nature 313:810-812. The construct also contains vector sequences (pUC9) to allow plasmid rescue, transposon sequences (Ds) to remobilize the T-DNA, and the bar gene to allow for glufosinate selection of transgenic plants. Only the 10.8 kb segment from the right border (RB) to left border (LB) inclusive will be transferred into the host plant genome. Since the enhancer elements are located near the RB, they can induce cis-activation of genomic loci following T-DNA integration.

[0302] The pHSbarENDs2 construct was transformed into Agrobacterium tumefaciens strain C58, grown in LB at 25° C. to OD600 ˜1.0. Cells were then pelleted by centrifugation and resuspended in an equal volume of 5% sucrose/0.05% Silwet L-77 (OSI Specialties, Inc). At early bolting, soil grown Arabidopsis thaliana ecotype Col-0 were top watered with the Agrobacterium suspension. A week later, the same plants were top watered again with the same Agrobacterium strain in sucrose/Silwet. The plants were then allowed to set seed as normal. The resulting T₁ seed were sown on soil, and transgenic seedlings were selected by spraying with glufosinate (Finale®; AgrEvo; Bayer Environmental Science). T₂ seed was collected from approximately 35,000 individual glufosinate resistant T₁ plants. T₂ plants were grown and equal volumes of T₃ seed from 96 separate T₂ lines were pooled. This constituted 360 sub-populations.

[0303] The Agrobacterium strain and whole plant transformation was performed as described above.

A total of 100,000 glufosinate resistant T₁ seedlings were selected. T₂ seed from each line was kept separate.

### Example 2A

### Screens to Identify Lines with Altered Root Architecture Non-Limiting Nitrogen Conditions

[0304] Activation-tagged Arabidopsis seedlings, grown under non-limiting nitrogen conditions, can be analyzed for altered root system architecture when compared to control seedlings during early development from the population described in Example 1.

[0305] From each of 96,000 separate T1 activation-tagged lines, ten T2 seeds can be sterilized with chlorine gas and planted on petri plates containing the following medium: 0.5×N-Free Hoagland's, 60 mM KNO₃, 0.1% sucrose, 1 mM MES and 1% Phytagel™. Typically 10 plates are placed in a rack. Plates are kept for three days at 4° C. to stratify seeds and then held vertically for 11 days at 22° C. light and 20° C. dark. Photoperiod is 16 h; 8 h dark, average light intensity was ˜180 μmol/m²/s. Racks (typically holding 10 plates each) are rotated daily within each shelf. At day 14, plates are evaluated for seedling status, whole plate digital images were taken, and analyzed for root area. Plates are arbitrarily divided in 10 horizontal areas. The root area in each of 10 horizontal zones on the plate is expressed as a percentage of the total area. Only areas in zones 3 to 9 are used to calculate the total root area of the line. Rootbot image analysis tool (proprietary) developed by ICORIA can be used to assess root area. Total root area is expressed in mm².

[0306] Lines with enhanced root growth characteristics are expected to lie at the upper extreme of the root area distributions. A sliding window approach can be used to estimate the variance in root area for a given rack with the assumption that there could be up to two outliers in the rack. Environmental variations in various factors including growth media, temperature, and humidity can cause significant variation in root growth, especially between sow dates. Therefore the lines are grouped by sow date and shelf for the data analysis. The racks in a particular sow date/shelf group are then sorted by mean root area. Root area distributions for sliding windows is performed by combining data for a rack, rᵢ, with data from the rack with the next lowest, (rₒ, and the next highest mean root area, rᵢ₊₁. The variance of the combined distribution is then analyzed to identify outliers in rᵢ using a Grubbs-type approach (Barnett et al., Outliers in Statistical Data, John Wiley & Sons, 3^{rd} edition (1994).

[0307] Lines with significant enhanced root growth as determined by the method outlined above, are designated as Phase 1 hits. Phase 1 hits are re-screened in duplicate under the same assay conditions. When either or both of the Phase 2 replicates shows a significant difference from the mean, the line is then considered a validated root architecture line.

Those lines that were again found to be outliers in at least one plate in Phase 2 were subjected to a Phase 3 screening performed in house, to validate the results obtained in Phase 1 and Phase 2. The results were validated in Phase 3 using both the Rootboot image analysis (as described above) and WinRHIZO®, as described below. The confirmation is performed in the same fashion as in the first round of screening. T2 seeds are sterilized using 75% EtOH 0.01% triton X-100 solution and plated onto the same plate medium as described in the first round of screening at a density of 4 seeds/plate, 8 plates per line. Plates are kept for three days at 4° C. to stratify seeds, and grown in the same temperature and photoperiod as the first experiment with the light intensity ˜160 μmol/m²/s. Plates are placed vertically into the eight center positions of a 10 plate rack with the first and last position holding blank plates. The racks and the plates within the rack are rotated every other day. Plants are imaged at 14 days of growth and these images are used for image analysis. These seedlings grown on vertical plates are analyzed for root growth with the software WinRHIZO® (regent Instruments Inc.), an image analysis system specifically designed for root measurement. WinRHIZO® uses the contrast pixels to distinguish the light root from the darker background. To identify the maximum amount of roots without picking up background, the pixel classification is 150-170 and the filter feature is used to remove objects that have a length/width ration less than 10.0. The area on the plates analyzed from is from the edge of the plant's leaves to about 1 cm from the bottom of the plate. The exact same WinRHIZO® settings and area of analysis are used to analyze all plates within a batch. The total root length score given by WinRHIZO® for a plate is divided by the number of plants that have germinated and have grown halfway down the plate. Eight plates for every line are grown and their scores are averaged. This average is then compared to the average of eight plates containing pooled T2 seeds taken from random lines that are grown at the same time.

### Example 2B

### Identification of Mutant Lines with an Altered Root Phenotype in a Mutant Population Limiting Nitrogen Conditions

[0308] A two-step screening procedure can be used, comprising:

[0309] (1) Identification of an altered root growth phenotype in a vertical plate assay;

[0310] (2) Confirm herbicide resistance and root phenotype in rescued mutant lines; The primary screen is based on vertical plates containing Nitrogen-free Hoagland salts, 0.3% sucrose and 1 mM KNO₃. The media also contains 0.8%-1.0% PhytaGel as a gelling agent. Media with Phytagel at 1.0% is sometimes difficult to pour as it solidifies quickly, however, at below 0.8% the media will slide off plates when placed vertically. Mutants from an activation-tagged population where pools of 100 lines each are available for a total of 36000 lines are being screened. On each plate, 12 mutant and 2 wild type Columbia seeds are seeded. Plates are placed in a growth room with a constant temperature of 26° C., 16 hr-day cycle with an average of 110 pE/m²s light intensity at the top of the plates. These plates are photographed 3-4 times in a 2.5 week time frame. Individual seedlings are rescued when a clear root phenotype is observed. Rescued seedlings are grown to maturity in a growth chamber (24° C., 16 hr day, 250-300 pE/m²s) for seed collection.

[0311] For the secondary screening, seeds from putative hits identified in the primary screen are sowed on plates containing the same media as above plus 6 mg/L bialaphos. Wild type Columbia seeds are sown at the same time on the same media but without bialaphos. Each plate has 10 seeds. There are 3 plates for each mutant line, and 2 plates for wild type Columbia, as replication. These plates are placed under the same growth conditions as described above in a growth room. Those lines that do not have herbicide resistance or no obvious root phenotype are discarded as false positives. Lines validated by the second screen are saved for further study.

### Example 3

### Identification of Activation-Tagged Genes

[0312] Genes flanking the T-DNA insert in lines with altered root architecture are identified using one, or both, of the following two standard procedures: (1) thermal asymmetric interlaced (TAIL) PCR (Liu et al., (1995), Plant J. 8:457-63); and (2) SAIFF PCR (Siebert et al., (1995) Nucleic Acids Res. 23:1087-1088). In lines with complex multimerized T-DNA inserts, TAIL PCR and SAIFF PCR may both prove insufficient to identify candidate genes. In these cases, other procedures, including inverse PCR, plasmid rescue and/or genomic library construction, can be employed.

[0313] A successful result is one where a single TAIL or SAIFF PCR fragment contains a T-DNA border sequence and Arabidopsis genomic sequence.

[0314] Once a tag of genomic sequence flanking a T-DNA insert is obtained, candidate genes are identified by alignment to publicly available Arabidopsis genome sequence.

[0315] Specifically, the annotated gene nearest the 35S enhancer elements/T-DNA RB are candidates for genes that are activated.

[0316] To verify that an identified gene is truly near a T-DNA and to rule out the possibility that the TAIL/SAIFF fragment is a chimeric cloning artifact, a diagnostic PCR on genomic DNA is done with one oligo in the T-DNA and one oligo specific for the candidate gene. Genomic DNA samples that give a PCR product are interpreted as representing a T-DNA insertion. This analysis also verifies a situation in which more than one insertion event occurs in the same line, e.g., if multiple differing genomic fragments are identified in TAIL and/or SAIFF PCR analyses.

### Example 4

### Identification of Activation-Tagged lpk Gene

[0317] The lpk gene was obtained by the screening procedure as described in Example 2A and subsequently subjected to a phase 3 (in house) screening as described in Example 2A. Identification of the activation-tagged gene was performed as described in Example 3.

[0318] One line displaying altered root architecture was further analyzed. DNA from the line was extracted and the T-DNA insertion was found by ligation mediated PCR (Siebert et al., (1995) Nucleic Acids Res. 23:1087-1088) using primers within the LeftBorder of the T-DNA. Once a tag of genomic sequence flanking a T-DNA insert was obtained, the candidate gene was identified by sequence alignment to the completed Arabidopsis genome. One of the insertion sites identified was identified as a chimeric insertion; Left Border T-DNA sequence was determined to be at both ends of the T-DNA insertion. It is still possible that the enhancer elements located near the Right Border of the T-DNA are close enough to have an effect on the nearby candidate gene. In this case the location of the Right Border was assumed to be present at the insertion site, and the two genes that flank the insertion site were chosen as candidates. One of the genes nearest the 35S enhancers of the chimeric insertion was AT5G60270 (SEQ ID NO:44); Arabidopsis thaliana lpk domain-containing protein, encoding the LPK protein (SEQ ID NO:46), referred herein as LPK domain-containing protein (LPK).

### Example 5A

### Validation of a Candidate Arabidopsis Gene (AT5G60270) for its Ability to Enhance Root Architecture in Plants Via Transformation into Arabidopsis

[0319] Candidate genes can be transformed into Arabidopsis and overexpressed under the 35S promoter. If the same or similar phenotype is observed in the transgenic line as in the parent activation-tagged line, then the candidate gene is considered to be a validated “lead gene” in Arabidopsis.

The Arabidopsis AT5G60270 gene can be directly tested for its ability to enhance root architecture in Arabidopsis.
The Arabidopsis AT5G60270 cDNA was PCR amplified with oligos that introduce the attB1 (SEQ ID NO:14) sequence, a consensus start sequence (CAACA) upstream of the ATG start codon and the first 21 nucleotides of the protein coding-region of the AT5G60270 cDNA (SEQ ID NO:45) and the attB2 (SEQ ID NO:15) sequence and the last 21 nucleotides of the protein-coding region including the stop codon of said cDNA. Using Invitrogen™ Gateway® technology a MultiSite Gateway® BP Recombination Reaction was performed with pDONR™/Zeo (Invitrogen™, FIG. 2; SEQ ID NO:2). This process removes the bacteria lethal ccdB gene, as well as the chloramphenicol resistance gene (CAM) from pDONR™/Zeo and directionally clones the PCR product with flanking attB1 (SEQ ID NO:14) and attB2 (SEQ ID NO:15) sites creating entry clone PHP30211.

[0320] A 16.8-kb T-DNA based binary vector, called pBC-yellow (FIG. 4, SEQ ID NO:4), was constructed with the 1.3-kb 35S promoter immediately upstream of the Invitrogen™ Gateway® C1 conversion insert containing the ccdB gene and the chloramphenicol resistance gene (CAM) flanked by attR1 and attR2 sequences. The vector also contains a YFP marker under the control of the Rd29a promoter for the selection of transformed seeds.

[0321] Using Invitrogen™ Gateway® technology a MultiSite Gateway® LR Recombination Reaction was performed on the entry clone containing the directionally cloned PCR product and pBC-yellow. This allowed rapid and directional cloning of the AT5G60270 gene behind the 35S promoter in pBC-yellow.

[0322] The 35S— AT5G60270 gene construct was introduced into wild-type Arabidopsis ecotype Col-0, using the same Agrobacterium-mediated transformation procedure described in Example 1.

[0323] Transgenic T1 plants were selected by the presence of the fluorescent YFP marker in the seed coat or herbicide selection. Fluorescent seeds were subjected to the Root Architecture Assay following the procedure described in Example 2A. Transgenic T1 seeds were re-screened using 6 plates per construct. Two plates per rack containing non-transformed Columbia seed discarded from fluorescent seed sorting served as a control.

[0324] Six plates per construct were analyzed statistically and a trend was detected between the number of plant growing on a plate and their average WinRHIZO®score. WinRHIZO®scores were normalized for this trend and the root score corresponding to the construct was divided by the wild-type root score.

### Example 5B

### Screen of Candidate Genes Under Nitrogen Limiting Conditions

[0325] Transgenic T1 seed selected by the presence of the fluorescent marker YFP as described above in Example 5A can also be screened for their tolerance to grow under nitrogen limiting conditions. For this purpose 32 transgenic individuals can be grown next to 32 wild-type individuals on one plate with either 0.4 mM KNO₃ or 60 mM KNO₃. If a line shows a statistically significant difference from the controls, the line is considered a validated nitrogen-deficiency tolerant line. After masking the plate image to remove background color, two different measurements are collected for each individual: total rosetta area, and the percentage of color that falls into a green color bin. Using hue, saturation and intensity data (HIS), the green color bin consists of hues 50-66. Total rosetta area is used as a measure of plant biomass, whereas the green color bin has been shown by dose-response studies to be an indicator of nitrogen assimilation.

### Example 5C

### Screen to Identify Lines with Improved Nitrate Uptake

[0326] For each overexpressor line, twelve T2 plants are sown on 96 well micro titer plates containing 2 mM MgSO₄, 0.5 mM KH₂PO₄, 1 mM CaCl₂, 2.5 mM KCl, 0.15 mM Sprint 330, 0.06 mM FeSO₄, 1 μM MnCl₂ 4H₂O, 1 μM ZnSO₄ 7H₂O, 3 μM H₃BO₃, 0.1 μM NaMoO₄, 0.1 μM CuSO₄ 5H₂O,

0.8 mM potassium nitrate, 0.1% sucrose, 1 mM MES, 200 μM bromophenol red and 0.40% Phytagel™ (pH assay medium). The pH of the medium is so that the color of bromophenol is red, the pH indicator dye, is yellow.

[0327] Four lines are plated per plate, and the inclusion of 12 wild-type individuals and 12 individuals from a line that has shown an improvement in nitrate uptake (positive control) on each plate makes for a total of 72 individuals on each 96 well micro titer plate A web-based random sequence generator can be used to determine the order of the lines on each plate. Seeds are not plated in Row A or Row H on the 96 well micro titer plate. Four plates are plated for each experiment, resulting in a maximum of 48 plants per line analyzed. Plates are kept for three days in the dark at 4° C. to stratify seeds, and then placed horizontally for six days at 22° C. light and dark. Photoperiod is sixteen hours light; eight hours dark, with an average light intensity of ˜200 mmol/m²/s. Plates are rotated and shuffled within each shelf. At day eight or nine (five or six days of growth), seedling status is evaluated by recording the color of the medium as pink, peach, yellow or no germination. Then the plants and/or seeds are removed from each well. Each medium plug is transferred to 1.2 ml micro titer tubes and placed in the corresponding well in a 96 well deep micro titer plate. An equal volume of water containing 2 μM flourescein is added to each 1.2 ml micro titer tube. The plate is covered with foil and autoclaved on liquid cycle. Each tube is mixed well, and an aliquot is removed from each tube and analyzed for amount of nitrate remaining in the medium. If t-test shows that a line is significantly different (p<0.05) from wild-type control, the line is then considered a validated improved nitrate uptake line.

### Example 6

### Composition of cDNA Libraries; Isolation and Sequencing of cDNA Clones

[0328] cDNA libraries may be prepared by any one of many methods available. For example, the cDNAs may be introduced into plasmid vectors by first preparing the cDNA libraries in Uni-ZAP™ XR vectors according to the manufacturer's protocol (Stratagene Cloning Systems, La Jolla, Calif.). The Uni-ZAP™ XR libraries are converted into plasmid libraries according to the protocol provided by Stratagene. Upon conversion, cDNA inserts will be contained in the plasmid vector pBluescript. In addition, the cDNAs may be introduced directly into precut Bluescript II SK(+) vectors (Stratagene) using T4 DNA ligase (New England Biolabs), followed by transfection into DH10B cells according to the manufacturer's protocol (GIBCO BRL Products). Once the cDNA inserts are in plasmid vectors, plasmid DNAs are prepared from randomly picked bacterial colonies containing recombinant pBluescript plasmids, or the insert cDNA sequences are amplified via polymerase chain reaction using primers specific for vector sequences flanking the inserted cDNA sequences. Amplified insert DNAs or plasmid DNAs are sequenced in dye-primer sequencing reactions to generate partial cDNA sequences (expressed sequence tags or “ESTs”; see Adams et al., (1991) Science 252:1651-1656). The resulting ESTs are analyzed using a Perkin Elmer Model 377 fluorescent sequencer.

[0329] Full-insert sequence (FIS) data is generated utilizing a modified transposition protocol. Clones identified for FIS are recovered from archived glycerol stocks as single colonies, and plasmid DNAs are isolated via alkaline lysis. Isolated DNA templates are reacted with vector primed M13 forward and reverse oligonucleotides in a PCR-based sequencing reaction and loaded onto automated sequencers. Confirmation of clone identification is performed by sequence alignment to the original EST sequence from which the FIS request is made.

[0330] Confirmed templates are transposed via the Primer Island transposition kit (PE Applied Biosystems, Foster City, Calif.) which is based upon the Saccharomyces cerevisiae Ty1 transposable element (Devine and Boeke (1994) Nucleic Acids Res. 22:3765-3772). The in vitro transposition system places unique binding sites randomly throughout a population of large DNA molecules. The transposed DNA is then used to transform DH10B electro-competent cells (Gibco BRL/Life Technologies, Rockville, Md.) via electroporation. The transposable element contains an additional selectable marker (named DHFR; Fling and Richards (1983) Nucleic Acids Res. 11:5147-5158), allowing for dual selection on agar plates of only those subclones containing the integrated transposon. Multiple subclones are randomly selected from each transposition reaction, plasmid DNAs are prepared via alkaline lysis, and templates are sequenced (ABI Prism dye-terminator ReadyReaction mix) outward from the transposition event site, utilizing unique primers specific to the binding sites within the transposon.

[0331] Sequence data is collected (ABI Prism Collections) and assembled using Phred and Phrap (Ewing et al. (1998) Genome Res. 8:175-185; Ewing and Green (1998) Genome Res. 8:186-194). Phred is a public domain software program which re-reads the ABI sequence data, re-calls the bases, assigns quality values, and writes the base calls and quality values into editable output files. The Phrap sequence assembly program uses these quality values to increase the accuracy of the assembled sequence contigs. Assemblies are viewed by the Consed sequence editor (Gordon et al. (1998) Genome Res. 8:195-202).

[0332] In some of the clones the cDNA fragment corresponds to a portion of the 3′-terminus of the gene and does not cover the entire open reading frame. In order to obtain the upstream information one of two different protocols are used. The first of these methods results in the production of a fragment of DNA containing a portion of the desired gene sequence while the second method results in the production of a fragment containing the entire open reading frame. Both of these methods use two rounds of PCR amplification to obtain fragments from one or more libraries. The libraries some times are chosen based on previous knowledge that the specific gene should be found in a certain tissue and some times are randomly-chosen. Reactions to obtain the same gene may be performed on several libraries in parallel or on a pool of libraries. Library pools are normally prepared using from 3 to 5 different libraries and normalized to a uniform dilution. In the first round of amplification both methods use a vector-specific (forward) primer corresponding to a portion of the vector located at the 5′-terminus of the clone coupled with a gene-specific (reverse) primer. The first method uses a sequence that is complementary to a portion of the already known gene sequence while the second method uses a gene-specific primer complementary to a portion of the 3′-untranslated region (also referred to as UTR). In the second round of amplification a nested set of primers is used for both methods. The resulting DNA fragment is ligated into a pBluescript vector using a commercial kit and following the manufacturer's protocol. This kit is selected from many available from several vendors including Invitrogen™ (Carlsbad, Calif.), Promega Biotech (Madison, Wis.), and Gibco-BRL (Gaithersburg, Md.). The plasmid DNA is isolated by alkaline lysis method and submitted for sequencing and assembly using Phred/Phrap, as above.

### Example 7

### Identification of cDNA Clones

[0333] cDNA clones encoding LPK polypeptides were identified by conducting BLAST (Basic Local Alignment Search Tool; Altschul et al. (1993) J. Mol. Biol. 215:403-410; see also the explanation of the BLAST algorithm on the world wide web site for the National Center for Biotechnology Information at the National Library of Medicine of the National Institutes of Health) searches for similarity to sequences contained in the BLAST “nr” database (comprising all non-redundant GenBank CDS translations, sequences derived from the 3-dimensional structure Brookhaven Protein Data Bank, the last major release of the SWISS-PROT protein sequence database, EMBL, and DDBJ databases). The cDNA sequences obtained as described in Example 6 were analyzed for similarity to all publicly available DNA sequences contained in the “nr” database using the BLASTN algorithm provided by the National Center for Biotechnology Information (NCBI). The DNA sequences were translated in all reading frames and compared for similarity to all publicly available protein sequences contained in the “nr” database using the BLASTX algorithm (Gish and States (1993) Nat. Genet. 3:266-272) provided by the NCBI. For convenience, the P-value (probability) of observing a match of a cDNA sequence to a sequence contained in the searched databases merely by chance as calculated by BLAST are reported herein as “pLog” values, which represent the negative of the logarithm of the reported P-value. Accordingly, the greater the pLog value, the greater the likelihood that the cDNA sequence and the BLAST “hit” represent homologous proteins.

[0334] ESTs submitted for analysis are compared to the Genbank database as described above. ESTs that contain sequences more 5- or 3-prime can be found by using the BLASTn algorithm (Altschul et al (1997) Nucleic Acids Res. 25:3389-3402.) against the Du Pont proprietary database comparing nucleotide sequences that share common or overlapping regions of sequence homology. Where common or overlapping sequences exist between two or more nucleic acid fragments, the sequences can be assembled into a single contiguous nucleotide sequence, thus extending the original fragment in either the 5 or 3 prime direction. Once the most 5-prime EST is identified, its complete sequence can be determined by Full Insert Sequencing as described in Example 6. Homologous genes belonging to different species can be found by comparing the amino acid sequence of a known gene (from either a proprietary source or a public database) against an EST database using the tBLASTn algorithm. The tBLASTn algorithm searches an amino acid query against a nucleotide database that is translated in all 6 reading frames. This search allows for differences in nucleotide codon usage between different species, and for codon degeneracy. In cases where the sequence assemblies are in fragments, the percent identity to other homologous genes can be used to infer which fragments represent a single gene. The fragments that appear to belong together can be computationally assembled such that a translation of the resulting nucleotide sequence will return the amino acid sequence of the homologous protein in a single open-reading frame. These computer-generated assemblies can then be aligned with other polypeptides of the invention. Alternatively the Velvet assembled fragments can be run against the dataset of the original trimmed reads with SSAKE (René L Warren, Granger G Sutton, Steven J M Jones, Robert A Holt. 2007 (epub 2006 Dec. 8). Assembling millions of short DNA sequences using SSAKE. Bioinformatics. 23:500-501.) SSAKE can be run with modified overlap parameters in order to extend the assembly with the trimmed reads.

### Example 8

### Characterization of cDNA Clones Encoding LPK Polypeptides

[0335] cDNA libraries representing mRNAs from various tissues of Arabidopsis, Maize, and soybean were prepared as described in Example 6. The characteristics of the libraries are described in Table 2.

TABLE 2
cDNA Libraries from, Maize

| Library | Tissue | Clone |
|---|---|---|
| adf2c | Arabidopsis Landsberg erecta flowers at | adf2c.pk002.h2 |
| | anthesis (DAF 0-1) | |
| cfp6n | Maize Leaf and Seed pooled, Full-length | cfp6n.pk065.d16:fis |
| | enriched normalized | |
| p0050 | Maize. | p0050.cjlae47r |
| p0110 | Maize. | p0110.cgsmp02r |
| sbacm | Soybean. | sbacm.pk094.p8.f |

[0336] The BLASTX search using the EST sequences from clones listed in Table 1 and SEQ ID NO:46 revealed similarity of the polypeptides encoded by the cDNAs to LPK polypeptides from Maize (GI NOs: 226528693, and 226502714 corresponding to SEQ ID NOs:47, and 48, respectively, Sorghum (Gi NOs: 242032451 and 242095594 corresponding to SEQ ID NOs:49 and 52, respectively), Medicago trunculata)Gi NO.:38112427) and from Arabidopsis (GI NOs: 15239261 and 15239260, respectively). Shown in Table 3 are the percent identity results for the sequences of the entire cDNA inserts (“Full-Insert Sequence” or “FIS”) of the clones listed in Table 2. Each cDNA insert encodes an entire functional protein (“Complete Gene Sequence” or “CGS”). Also shown in Tables 3 and 4 are the percent sequence identity values per each pair of amino acid sequences using the Clustal V method of alignment with default parameters.

TABLE 1
BLASTP Results and Percent Identity for Sequences Encoding
Polypeptides Homologous to LPK Polypeptides

| | | NCBI GI No./ | | |
|---|---|---|---|---|
| | | gene | | |
| Sequence | Status | accession no. | E-value | % identity |
| p0110.cgsmp02r | CGS | 226528693 | 0.00e+0 | 100 |
| SEQ ID NO: 27 | | (Zea mays) | | |
| | | SEQ ID NO: 47 | | |
| cfp6n.pk065.d16:fis | CGS | 226502714 | 0.00e+0 | 100 |
| SEQ ID NO: 29 | | (Zea mays) | | |
| | | SEQ ID NO: 48 | | |
| Pred1 | CGS | 242032451 | 0.00e+0 | 83.6 |
| SEQ ID NO: 35 | | (Sorghum | | |
| | | bicolor) | | |
| | | SEQ ID NO: 49 | | |
| Pred2 | CGS | 38112427 | 8.70e−297 | 99.3 |
| SEQ ID NO: 37 | | (Medicago | | |
| | | trunculata) | | |
| | | SEQ ID NO: 50 | | |
| Pred3 | CGS | 15239261 | 0.00e+0 | 100 |
| SEQ ID NO: 39 | | (Arabidopsis | | |
| | | thaliana) | | |
| | | SEQ ID NO: 51 | | |
| Custom6.pk880.d9 | CGS | 242095594 | 0.00e+0 | 85.5 |
| (SEQ ID NO: 41) | | (Sorghum | | |
| | | bicolor) | | |
| | | SEQ ID NO: 52 | | |
| Custom5.pk735.d4 | CGS | 15239260 | 0.00e+0 | 100 |
| (SEQ ID NO: 43) | | (Arabidopsis | | |
| | | thaliana) | | |
| | | SEQ ID NO: 53 | | |
| Resurrection grass | CGS | XP_002461846 | 0.00e+0 | 78.2 |
| 38031 | | (Sorghum | | |
| (SEQ ID NO: 68) | | bicolor) | | |
| | | SEQ ID NO: 71 | | |
| Resurrection grass | CGS | XP_002441536 | 0.00e+0 | 92.4 |
| 175180 | | (Sorghum | | |
| (SEQ ID NO: 70) | | bicolor) | | |
| | | SEQ ID NO: 72 | | |

[0337] Pred 1, 2, and 3 were obtained using long range genomic PCR capture and analyzed using the FGENESH program. Additionally, the sequence was aligned with sequences from other species, and manually edited to remove putative introns. Primers designed based on the genomic locus of Pred1, 2, and 3 were used for long range genomic PCR capture. The resulting PCR product was sequenced and the FGENESH program and manually editing was used to predict the coding sequence of pred1, 2, and 3 (SEQ ID NO: 34, 36 and 38, respectively).

[0338] FIGS. 15A through 15K show the multiple alignment of the full length amino acid sequences of SEQ ID NOs: 27, 29, 35, 37, 39, 41, 43, 46, 47, 48, 49, 50, 51, 52, 53, 54, 55, 56, 57, 58, and 59. FIG. 16 presents the percent sequence identities and divergence values for each sequence pair presented in FIGS. 15A through 15K.

[0339] Sequence alignments and percent identity calculations were performed using the Megalign program of the LASERGENE bioinformatics computing suite (DNASTAR Inc., Madison, Wis.). Multiple alignment of the sequences was performed using the Clustal method of alignment (Higgins and Sharp (1989) CABIOS. 5:151-153) with the default parameters (GAP PENALTY=10, GAP LENGTH PENALTY=10). Default parameters for pairwise alignments using the Clustal method were KTUPLE 1, GAP PENALTY=3, WINDOW=5 and DIAGONALS SAVED=5.

[0340] Sequence alignments and percent identity indicate that the nucleic acid fragments comprising the instant cDNA clones encode LPK polypeptides.

TABLE 4
BLASTP Results and Percent identity for Sequences Encoding
Polypeptides Homologous to LPK polypeptides

| Sequence | Status | Reference | E-value | % identity |
|---|---|---|---|---|
| p0110.cgsmp02r | CGS | SEQ ID NO: | 1.30e−271 | 68.1 |
| SEQ ID NO: 27 | | 138302 | | |
| | | (Oryza sativa) in | | |
| | | EP2090662 | | |
| | | (SEQ ID NO: 54) | | |
| cfp6n.pk065.d16:fis | CGS | SEQ ID NO: | 0.00e+0 | 100 |
| SEQ ID NO: 29 | | 69317 | | |
| | | (Zea mays) | | |
| | | EP2090662 | | |
| | | (SEQ ID NO: 55) | | |
| Pred1 | CGS | SEQ ID NO: | 2.00e−259 | 65 |
| SEQ ID NO: 35 | | 138302 | | |
| | | (Oryza sativa) in | | |
| | | EP2090662 | | |
| | | (SEQ ID NO: 54) | | |
| Pred2 | CGS | SEQ ID NO: | 0.00e+0 | 99.3 |
| SEQ ID NO: 37 | | 193726 | | |
| | | (Glycine max) in | | |
| | | EP2090662 | | |
| | | (SEQ ID NO: 56) | | |
| Pred3 | CGS | SEQ ID NO: | 0.00e+0 | 100 |
| SEQ ID NO: 39 | | 167274 | | |
| | | (Arabidopsis | | |
| | | thaliana) | | |
| | | in EP2090662 | | |
| | | (SEQ ID NO: 57) | | |
| Custom6.pk0880.d9 | CGS | SEQ ID NO: | 0.00e+0 | 97.6 |
| SEQ ID NO: 41 | | 167322 | | |
| | | (Zea mays) in | | |
| | | EP2090662 | | |
| | | (SEQ ID NO: 58) | | |
| Custom5.pk735.d4 | CGS | SEQ ID NO: | 0.00e+0 | 100 |
| SEQ ID NO: 43 | | 167272 | | |
| | | (Arabidopsis | | |
| | | thaliana) | | |
| | | in EP2090662 | | |
| | | (SEQ ID NO: 59) | | |

### Example 9

### Preparation of a Plant Expression Vector Containing a Homolog of the Arabidopsis Lead Gene (AT5G60270)

[0341] Sequences homologous to the lead lpk gene can be identified using sequence comparison algorithms such as BLAST (Basic Local Alignment Search Tool; Altschul et al., J. Mol. Biol. 215:403-410 (1993); see also the explanation of the BLAST algorithm on the world wide web site for the National Center for Biotechnology Information at the National Library of Medicine of the National Institutes of Health). Homologous lpk sequences, such as the ones described in Example 8, can be PCR-amplified by either of the following methods.

[0342] Method 1 (RNA-based): If the 5′ and 3′ sequence information for the protein-coding region of a LPK polypeptide homolog is available, gene-specific primers can be designed as outlined in Example 5A. RT-PCR can be used with plant RNA to obtain a nucleic acid fragment containing the lpk protein-coding region flanked by attB1 (SEQ ID NO:14) and attB2 (SEQ ID NO:15) sequences. The primer may contain a consensus Kozak sequence (CAACA) upstream of the start codon.

[0343] Method 2 (DNA-based): Alternatively, if a cDNA clone is available for a gene encoding a LPK polypeptide homolog, the entire cDNA insert (containing 5′ and 3′ non-coding regions) can be PCR amplified. Forward and reverse primers can be designed that contain either the attB1 sequence and vector-specific sequence that precedes the cDNA insert or the attB2 sequence and vector-specific sequence that follows the cDNA insert, respectively. For a cDNA insert cloned into the vector pBluescript SK-F, the forward primer VC062 (SEQ ID NO:16) and the reverse primer VC063 (SEQ ID NO:17) can be used.

[0344] Methods 1 and 2 can be modified according to procedures known by one skilled in the art. For example, the primers of method 1 may contain restriction sites instead of attB1 and attB2 sites, for subsequent cloning of the PCR product into a vector containing attB1 and attB2 sites. Additionally, method 2 can involve amplification from a cDNA clone, a lambda clone, a BAC clone or genomic DNA.

[0345] A PCR product obtained by either method above can be combined with the Gateway® donor vector, such as pDONR™/Zeo (Invitrogen™, FIG. 2; SEQ ID NO:2) or pDONR™221 (Invitrogen™, FIG. 3; SEQ ID NO:3) using a BP Recombination Reaction. This process removes the bacteria lethal ccdB gene, as well as the chloramphenicol resistance gene (CAM) from pDONR™221 and directionally clones the PCR product with flanking attB1 and attB2 sites to create an entry clone. Using the Invitrogen™ Gateway® Clonase™ technology, the homologous lpk gene from the entry clone can then be transferred to a suitable destination vector to obtain a plant expression vector for use with Arabidopsis, corn and soy, such as pBC-Yellow (FIG. 4; SEQ ID NO:4), PHP27840 (FIG. 5; SEQ ID NO:5) or PHP23236 (FIG. 6; SEQ ID NO:6), to obtain a plant expression vector for use with Arabidopsis, soybean and corn, respectively.

[0346] Alternatively a MultiSite Gateway® LR recombination reaction between multiple entry clones and a suitable destination vector can be performed to create an expression vector. An Example of this procedure is outlined in Example 14A, describing the construction of maize expression vectors for transformation of maize lines.

### Example 10

### Preparation of Soybean Expression Vectors and Transformation of Soybean with Validated Arabidopsis Lead Genes and Homologs Thereof

[0347] Soybean plants can be transformed to overexpress the validated Arabidopsis gene (AT5G60270) and the corresponding homologs from various species in order to examine the resulting phenotype.

[0348] The entry clones described in Example 5A and 9 can be used to directionally clone each gene into PHP27840 vector (FIG. 5, SEQ ID NO:5) such that expression of the gene is under control of the SCP1 promoter.

[0349] Soybean embryos may then be transformed with the expression vector comprising sequences encoding the instant polypeptides.

[0350] To induce somatic embryos, cotyledons, 3-5 mm in length dissected from surface sterilized, immature seeds of the soybean cultivar A2872, can be cultured in the light or dark at 26° C. on an appropriate agar medium for 6-10 weeks. Somatic embryos, which produce secondary embryos, are then excised and placed into a suitable liquid medium. After repeated selection for clusters of somatic embryos which multiply as early, globular staged embryos, the suspensions are maintained as described below.

[0351] Soybean embryogenic suspension cultures can be maintained in 35 mL liquid media on a rotary shaker, 150 rpm, at 26° C. with florescent lights on a 16:8 hour day/night schedule. Cultures are subcultured every two weeks by inoculating approximately 35 mg of tissue into 35 mL of liquid medium. Soybean embryogenic suspension cultures may then be transformed by the method of particle gun bombardment (Klein et al. (1987) Nature (London) 327:70-73, U.S. Pat. No. 4,945,050). A DuPont Biolistic™ PDS1000/HE instrument (helium retrofit) can be used for these transformations.

[0352] A selectable marker gene which can be used to facilitate soybean transformation is a chimeric gene composed of the 35S promoter from cauliflower mosaic virus (Odell et al. (1985) Nature 313:810-812), the hygromycin phosphotransferase gene from plasmid pJR225 (from E. coli; Gritz et al. (1983) Gene 25:179-188) and the 3′ region of the nopaline synthase gene from the T-DNA of the Ti plasmid of Agrobacterium tumefaciens. Another selectable marker gene which can be used to facilitate soybean transformation is an herbicide-resistant acetolactate synthase (ALS) gene from soybean or Arabidopsis. ALS is the first common enzyme in the biosynthesis of the branched-chain amino acids valine, leucine and isoleucine. Mutations in ALS have been identified that convey resistance to some or all of three classes of inhibitors of ALS (U.S. Pat. No. 5,013,659; the entire contents of which are herein incorporated by reference). Expression of the herbicide-resistant ALS gene can be under the control of a SAM synthetase promoter (U.S. Patent Application No. US-2003-0226166-A1; the entire contents of which are herein incorporated by reference).

[0353] To 50 μL of a 60 mg/mL 1 μm gold particle suspension is added (in order): 5 μL DNA (1 μg/μL), 20 μL spermidine (0.1 M), and 50 μL CaCl₂ (2.5 M). The particle preparation is then agitated for three minutes, spun in a microfuge for 10 seconds and the supernatant removed. The DNA-coated particles are then washed once in 400 μL 70% ethanol and resuspended in 40 μL of anhydrous ethanol. The DNA/particle suspension can be sonicated three times for one second each. Five μL of the DNA-coated gold particles are then loaded on each macro carrier disk.

[0354] Approximately 300-400 mg of a two-week-old suspension culture is placed in an empty 60×15 mm petri dish and the residual liquid removed from the tissue with a pipette. For each transformation experiment, approximately 5-10 plates of tissue are normally bombarded. Membrane rupture pressure is set at 1100 psi and the chamber is evacuated to a vacuum of 28 inches mercury. The tissue is placed approximately 3.5 inches away from the retaining screen and bombarded three times. Following bombardment, the tissue can be divided in half and placed back into liquid and cultured as described above.

[0355] Five to seven days post bombardment, the liquid media may be exchanged with fresh media, and eleven to twelve days post bombardment with fresh media containing 50 mg/mL hygromycin. This selective media can be refreshed weekly. Seven to eight weeks post bombardment, green, transformed tissue may be observed growing from untransformed, necrotic embryogenic clusters. Isolated green tissue is removed and inoculated into individual flasks to generate new, clonally propagated, transformed embryogenic suspension cultures. Each new line may be treated as an independent transformation event. These suspensions can then be subcultured and maintained as clusters of immature embryos or regenerated into whole plants by maturation and germination of individual somatic embryos.

[0356] Enhanced root architecture can be measured in soybean by growing the plants in soil and wash the roots before analysis of the total root mass with WinRHIZO®.

[0357] Soybean plants transformed with validated genes can then be assayed to study agronomic characteristics relative to control or reference plants. For example, nitrogen utilization efficacy, yield enhancement and/or stability under various environmental conditions (e.g. nitrogen limiting conditions, drought etc.)

### Example 11

### Transformation of Maize with Validated Arabidopsis Lead Genes Using Particle Bombardment

[0358] Maize plants can be transformed to overexpress a validated Arabidopsis lead gene or the corresponding homologs from various species in order to examine the resulting phenotype.

[0359] The Gateway® entry clones described in Example 5A can be used to directionally clone each gene into a maize transformation vector. Expression of the gene in maize can be under control of a constitutive promoter such as the maize ubiquitin promoter (Christensen et al., Plant Mol. Biol. 12:619-632 (1989) and Christensen et al., Plant Mol. Biol. 18:675-689 (1992))

[0360] The recombinant DNA construct described above can then be introduced into maize cells by the following procedure. Immature maize embryos can be dissected from developing caryopses derived from crosses of the inbred maize lines H99 and LH132. The embryos are isolated ten to eleven days after pollination when they are 1.0 to 1.5 mm long. The embryos are then placed with the axis-side facing down and in contact with agarose-solidified N6 medium (Chu et al., Sci. Sin. Peking 18:659-668 (1975)). The embryos are kept in the dark at 27° C. Friable embryogenic callus consisting of undifferentiated masses of cells with somatic proembryoids and embryoids borne on suspensor structures proliferates from the scutellum of these immature embryos. The embryogenic callus isolated from the primary explant can be cultured on N6 medium and sub-cultured on this medium every two to three weeks.

[0361] The plasmid, p35S/Ac (obtained from Dr. Peter Eckes, Hoechst Ag, Frankfurt, Germany) may be used in transformation experiments in order to provide for a selectable marker. This plasmid contains the pat gene (see European Patent Publication 0 242 236) which encodes phosphinothricin acetyl transferase (PAT). The enzyme PAT confers resistance to herbicidal glutamine synthetase inhibitors such as phosphinothricin. The pat gene in p35S/Ac is under the control of the 35S promoter from cauliflower mosaic virus (Odell et al., Nature 313:810-812 (1985)) and the 3′ region of the nopaline synthase gene from the T-DNA of the Ti plasmid of Agrobacterium tumefaciens.

[0362] The particle bombardment method (Klein et al., Nature 327:70-73 (1987)) may be used to transfer genes to the callus culture cells. According to this method, gold particles (1 μm in diameter) are coated with DNA using the following technique. Ten μg of plasmid DNAs are added to 50 μL of a suspension of gold particles (60 mg per mL). Calcium chloride (50 μL of a 2.5 M solution) and spermidine free base (20 μL of a 1.0 M solution) are added to the particles. The suspension is vortexed during the addition of these solutions. After ten minutes, the tubes are briefly centrifuged (5 sec at 15,000 rpm) and the supernatant removed. The particles are resuspended in 200 μL of absolute ethanol, centrifuged again and the supernatant removed. The ethanol rinse is performed again and the particles resuspended in a final volume of 30 μL of ethanol. An aliquot (5 μL) of the DNA-coated gold particles can be placed in the center of a Kapton™ flying disc (Bio-Rad Labs). The particles are then accelerated into the maize tissue with a Biolistic® PDS-1000/He (Bio-Rad Instruments, Hercules Calif.), using a helium pressure of 1000 psi, a gap distance of 0.5 cm and a flying distance of 1.0 cm.

[0363] For bombardment, the embryogenic tissue is placed on filter paper over agarose-solidified N6 medium. The tissue is arranged as a thin lawn and covered a circular area of about 5 cm in diameter. The petri dish containing the tissue can be placed in the chamber of the PDS-1000/He approximately 8 cm from the stopping screen. The air in the chamber is then evacuated to a vacuum of 28 inches of Hg. The macrocarrier is accelerated with a helium shock wave using a rupture membrane that bursts when the He pressure in the shock tube reaches 1000 psi.

[0364] Seven days after bombardment the tissue can be transferred to N6 medium that contains bialaphos (5 mg per liter) and lacks casein or proline. The tissue continues to grow slowly on this medium. After an additional two weeks the tissue can be transferred to fresh N6 medium containing bialaphos. After six weeks, areas of about 1 cm in diameter of actively growing callus can be identified on some of the plates containing the bialaphos-supplemented medium. These calli may continue to grow when sub-cultured on the selective medium.

[0365] Plants can be regenerated from the transgenic callus by first transferring clusters of tissue to N6 medium supplemented with 0.2 mg per liter of 2,4-D. After two weeks the tissue can be transferred to regeneration medium (Fromm et al., Bio/Technology 8:833-839 (1990)).

[0366] Transgenic T0 plants can be regenerated and their phenotype determined following HTP procedures. T1 seed can be collected.

[0367] T1 plants can be grown and analyzed for phenotypic changes. The following parameters can be quantified using image analysis: plant area, volume, growth rate and color analysis can be collected and quantified. Expression constructs that result in an alteration of root architecture or any one of the agronomic characteristics listed above compared to suitable control plants, can be considered evidence that the Arabidopsis lead gene functions in maize to alter root architecture or plant architecture.

[0368] Furthermore, a recombinant DNA construct containing a validated Arabidopsis gene can be introduced into an maize line either by direct transformation or introgression from a separately transformed line.

[0369] Transgenic plants, either inbred or hybrid, can undergo more vigorous field-based experiments to study root or plant architecture, yield enhancement and/or resistance to root lodging under various environmental conditions (e.g. variations in nutrient and water availability).

[0370] Subsequent yield analysis can also be done to determine whether plants that contain the validated Arabidopsis lead gene have an improvement in yield performance, when compared to the control (or reference) plants that do not contain the validated Arabidopsis lead gene. Plants containing the validated Arabidopsis lead gene would improve yield relative to the control plants, for example by 50% less yield loss under adverse environmental conditions or would have increased yield relative to the control plants under varying environmental conditions.

### Example 12

### Electroporation of Aqrobacterium tumefaciens LBA4404

[0371] Electroporation competent cells (40 μl), such as Agrobacterium tumefaciens LBA4404 (containing PHP10523), are thawn on ice (20-30 min). PHP10523 contains VIR genes for T-DNA transfer, an Agrobacterium low copy number plasmid origin of replication, a tetracycline resistance gene, and a cos site for in vivo DNA biomolecular recombination. Meanwhile the electroporation cuvette is chilled on ice. The electroporator settings are adjusted to 2.1 kV.

[0372] A DNA aliquot (0.5 μL JT (U.S. Pat. No. 7,087,812) parental DNA at a concentration of 0.2 μg-1.0 μg in low salt buffer or twice distilled H₂O) is mixed with the thawn Agrobacterium cells while still on ice. The mix is transferred to the bottom of electroporation cuvette and kept at rest on ice for 1-2 min. The cells are electroporated (Eppendorf electroporator 2510) by pushing “Pulse” button twice (ideally achieving a 4.0 msec pulse). Subsequently 0.5 ml 2xYT medium (or SOCmedium) are added to cuvette and transferred to a 15 ml Falcon tube. The cells are incubated at 28-30° C., 200-250 rpm for 3 h.

[0373] Aliquots of 250 μl are spread onto #30B (YM+50 μg/mL Spectinomycin) plates and incubated 3 days at 28-30° C. To increase the number of transformants one of two optional steps can be performed:

Option 1: overlay plates with 30 μl of 15 mg/ml Rifampicin. LBA4404 has a chromosomal resistance gene for Rifampicin. This additional selection eliminates some contaminating colonies observed when using poorer preparations of LBA4404 competent cells.
Option 2: Perform two replicates of the electroporation to compensate for poorer electrocompetent cells.

### Identification of Transformants:

[0374] Four independent colonies are picked and streaked on AB minimal medium plus 50 mg/mL Spectinomycin plates (#12S medium) for isolation of single colonies. The plated are incubate at 28° C. for 2-3 days.

[0375] A single colony for each putative co-integrate is picked and inoculated with 4 ml #60A with 50 mg/l Spectinomycin. The mix is incubated for 24 h at 28° C. with shaking. Plasmid DNA from 4 ml of culture is isolated using Qiagen Miniprep+optional PB wash. The DNA is eluted in 30 μl. Aliquots of 2 μl are used to electroporate 20 μl of DH10b+20 μl of ddH₂O as per above.

Optionally a 15 μl aliquot can be used to transform 75-100 μl of Invitrogen™-Library Efficiency DH5α. The cells are spread on LB medium plus 50 mg/mL Spectinomycin plates (#34T medium) and incubated at 37° C. overnight.

[0376] Three to four independent colonies are picked for each putative co-integrate and inoculated 4 ml of 2xYT (#60A) with 50 μg/ml Spectinomycin. The cells are incubated at 37° C. overnight with shaking.

[0377] The plasmid DNA is isolated from 4 ml of culture using QiAprep® Miniprep with optional PB wash (elute in 50 μl) and 8 μl are used for digestion with SalI (using JT parent and PHP10523 as controls).

[0378] Three more digestions using restriction enzymes BamHI, EcoRI, and HindIII are performed for 4 plasmids that represent 2 putative co-integrates with correct SalI digestion pattern (using parental DNA and PHP10523 as controls). Electronic gels are recommended for comparison.

[0379] Alternatively, for high throughput applications, such as described for Gaspe Flint Derived Maize Lines (Examples 15-17), instead of evaluating the resulting co-integrate vectors by restriction analysis, three colonies can be simultaneously used for the infection step as described in Example 13.

### Example 13

### Agrobacterium Mediated Transformation into Maize

[0380] Maize plants can be transformed to overexpress a validated Arabidopsis lead gene or the corresponding homologs from various species in order to examine the resulting phenotype.

[0381] Agrobacterium-mediated transformation of maize is performed essentially as described by Zhao et al., in Meth. Mol. Biol. 318:315-323 (2006) (see also Zhao et al., Mol. Breed. 8:323-333 (2001) and U.S. Pat. No. 5,981,840 issued Nov. 9, 1999, incorporated herein by reference). The transformation process involves bacterium innoculation, co-cultivation, resting, selection and plant regeneration.

### 1. Immature Embryo Preparation

[0382] Immature embryos are dissected from caryopses and placed in a 2 mL microtube containing 2 mL PHI-A medium.

### 2. Agrobacterium Infection and Co-Cultivation of Embryos

### 2.1 Infection Step

[0383] PHI-A medium is removed with 1 mL micropipettor and 1 mL Agrobacterium suspension is added. Tube is gently inverted to mix. The mixture is incubated for 5 min at room temperature.

### 2.2 Co-Culture Step

[0384] The Agrobacterium suspension is removed from the infection step with a 1 mL micropipettor. Using a sterile spatula the embryos are scraped from the tube and transferred to a plate of PHI-B medium in a 100×15 mm Petri dish. The embryos are oriented with the embryonic axis down on the surface of the medium. Plates with the embryos are cultured at 20° C., in darkness, for 3 days. L-Cysteine can be used in the co-cultivation phase. With the standard binary vector, the co-cultivation medium supplied with 100-400 mg/L L-cysteine is critical for recovering stable transgenic events.

### 3. Selection of Putative Transgenic Events

[0385] To each plate of PHI-D medium in a 100×15 mm Petri dish, 10 embryos are transferred, maintaining orientation and the dishes are sealed with Parafilm. The plates are incubated in darkness at 28° C. Actively growing putative events, as pale yellow embryonic tissue are expected to be visible in 6-8 weeks. Embryos that produce no events may be brown and necrotic, and little friable tissue growth is evident. Putative transgenic embryonic tissue is subcultured to fresh PHI-D plates at 2-3 week intervals, depending on growth rate. The events are recorded.

4. Regeneration of T0 plants

[0386] Embryonic tissue propagated on PHI-D medium is subcultured to PHI-E medium (somatic embryo maturation medium); in 100×25 mm Petri dishes and incubated at 28° C., in darkness, until somatic embryos mature, for about 10-18 days. Individual, matured somatic embryos with well-defined scutellum and coleoptile are transferred to PHI-F embryo germination medium and incubated at 28° C. in the light (about 80 μE from cool white or equivalent fluorescent lamps). In 7-10 days, regenerated plants, about 10 cm tall, are potted in horticultural mix and hardened-off using standard horticultural methods.

[0387] Media for Plant Transformation
[0388] 1. PHI-A: 4 g/L CHU basal salts, 1.0 mL/L 1000× Eriksson's vitamin mix, 0.5 mg/L thiamin HCL, 1.5 mg/L 2,4-D, 0.69 g/L L-proline, 68.5 g/L sucrose, 36 g/L glucose, pH 5.2. Add 100 μM acetosyringone, filter-sterilized before using.
[0389] 2. PHI-B: PHI-A without glucose, increased 2,4-D to 2 mg/L, reduced sucrose to 30 g/L and supplemented with 0.85 mg/L silver nitrate (filter-sterilized), 3.0 g/L gelrite, 100 μM acetosyringone (filter-sterilized), 5.8.
[0390] 3. PHI-C: PHI-B without gelrite and acetosyringonee, reduced 2,4-D to 1.5 mg/L and supplemented with 8.0 g/L agar, 0.5 g/L Ms-morpholino ethane sulfonic acid (MES) buffer, 100 mg/L carbenicillin (filter-sterilized).
[0391] 4. PHI-D: PHI—C supplemented with 3 mg/L bialaphos (filter-sterilized).

[0392] 5. PHI-E: 4.3 g/L of Murashige and Skoog (MS) salts, (Gibco, BRL 11117-074), 0.5 mg/L nicotinic acid, 0.1 mg/L thiamine HCl, 0.5 mg/L pyridoxine HCl, 2.0 mg/L glycine, 0.1 g/L myo-inositol, 0.5 mg/L zeatin (Sigma, cat. no. Z-0164), 1 mg/L indole acetic acid (IAA), 26.4 μg/L abscisic acid (ABA), 60 g/L sucrose, 3 mg/L bialaphos (filter-sterilized), 100 mg/L carbenicillin (filter-sterilized), 8 g/L agar, pH 5.6.
[0393] 6. PHI-F: PHI-E without zeatin, IAA, ABA; sucrose reduced to 40 g/L; replacing agar with 1.5 g/L gelrite; pH 5.6.

[0394] Plants can be regenerated from the transgenic callus by first transferring clusters of tissue to N6 medium supplemented with 0.2 mg per liter of 2,4-D. After two weeks the tissue can be transferred to regeneration medium (Fromm et al. (1990) Bio/Technology 8:833-839).

Phenotypic analysis of transgenic T0 plants and T1 plants can be performed.

[0395] T1 plants can be analyzed for phenotypic changes. Using image analysis T1 plants can be analyzed for phenotypical changes in plant area, volume, growth rate and color analysis can be taken at multiple times during growth of the plants. Alteration in root architecture can be assayed as described in Example 20.

[0396] Subsequent analysis of alterations in agronomic characteristics can be done to determine whether plants containing the validated Arabidopsis lead gene have an improvement of at least one agronomic characteristic, when compared to the control (or reference) plants that do not contain the validated Arabidopsis lead gene. The alterations may also be studied under various environmental conditions.

[0397] Expression constructs that result in a significant alteration in root architecture will be considered evidence that the Arabidopsis gene functions in maize to alter root architecture.

### Example 14A

### Construction of Maize Expression Vectors with the Arabidopsis Lead Gene (AT5G60270) Using Agrobacterium Mediated Transformation

[0398] Maize expression vectors can be prepared with the Arabidopsis lpk gene (AT5G60270) under the control of the NAS2 (SEQ ID NO:19) and GOS2 (SEQ ID NO:20) promoter. PINII may be the terminator (SEQ ID NO:23) Using Invitrogen™ Gateway® technology the entry clone, created as described in Example 5A, containing the Arabidopsis lpk gene (AT5G60270) can be used in separate Gateway® LR reactions with:

[0399] 1) the constitutive maize GOS2 promoter entry clone (PHP28408, FIG. 11, SEQ ID NO:11) and the PinII Terminator entry clone (PHP20234, FIG. 9, SEQ ID NO:9) into the destination vector PHP28529 (FIG. 10, SEQ ID NO:10).

[0400] 2) the root maize NAS2 promoter entry clone (PHP22020, FIG. 12, SEQ ID NO:12) and the PinII Terminator entry clone (PHP20234, FIG. 9, SEQ ID NO:9) into the destination vector PHP28529 (FIG. 10, SEQ ID NO:10).

[0401] The destination vector PHP28529 adds to each of the final vectors (created in steps 1 and 2) also an:
[0402] 1) RD29A promoter::yellow fluorescent protein::PinII terminator cassette for Arabidospis seed sorting
[0403] 2) a Ubiquitin promoter::moPAT/red fluorescent protein fusion::PinII terminator cassette for transformation selection and Z. mays seed sorting.

### Example 14B

### Preparation of Maize Expression Constructs Containing the Arabidopsis lpk Gene and Homologs Thereof

[0404] The Arabidopsis lpk gene and the corresponding homologs from maize and other species (Table 1 and SEQ ID NO:27) can be transformed into maize lines using the procedures outlined in Examples 5A and 14A. In addition to the GOS2 or NAS2 promoter, other promoters such as, but not limited to the ubiquitin promoter, the S2A and S2B promoter, the maize ROOTMET2 promoter, the maize Cyclo, the CR1BIO, the CRWAQ81 and the maize ZRP2.4447 are useful for directing expression of lpk genes in maize. Furthermore, a variety of terminators, such as, but not limited to the PINII terminator, could be used to achieve expression of the gene of interest in maize.

### Example 14C

### Transformation of Maize Lines with the Arabidopsis Lead Gene (AT5G60270) and Corresponding Homologs from Other Species Using Agrobacterium Mediated Transformation

[0405] The final vectors (vectors for expression in Maize, Example 14A, and B) can be then electroporated separately into LBA4404 Agrobacterium containing PHP10523 (FIG. 7; SEQ ID NO:7, Komari et al. Plant J 10:165-174 (1996), NCBI GI: 59797027) to create the co-integrate vectors for maize transformation. The co-integrate vectors are formed by recombination of the final vectors (maize expression vectors) with PHP10523, through the COS recombination sites contained on each vector. The co-integrate vectors contain in addition to the expression cassettes described in Examples 14A-B, also genes needed for the Agrobacterium strain and the Agrobacterium mediated transformation, (TET, TET, TRFA, ORI terminator, CTL, ORI V, VIR C1, VIR C2, VIR G, VIR B). Transformation into a maize line can be performed as described in Example 13.

### Example 14D

### Construction of Maize Expression Vectors with the Arabidopsis Lead Gene (AT5G60270) Using Agrobacterium Mediated Transformation

[0406] Maize expression vectors can be prepared with the Arabidopsis lpk gene (AT5G60270) under the control of the NAS2 (SEQ ID NO:19) and UBI (SEQ ID NO: 21) promoter. PINII may be the terminator (SEQ ID NO:23).
Using Invitrogen™ Gateway® technology the entry clone, created as described in Example 5A, containing the Arabidopsis lpk gene (AT5G60270) can be used in separate Gateway® LR reactions with:

[0407] I) the destination vector PHP28647 (FIG. 19, SEQ ID NO:62), which adds the constitutive maize UBI promoter and the PinII Terminator. The destination vector PHP28647 adds to the final vector created above also an:
[0408] 1) LTP2 promoter::red fluorescent protein::PinII terminator cassette for Z. mays seed sorting
[0409] 2) a Ubiquitin promoter::moPAT::PinII terminator cassette for transformation selection.
   The resulting vector was named PHP31191.

[0410] II) the root maize NAS2 promoter entry clone (PHP22020, FIG. 12, SEQ ID NO:12) and the PinII Terminator entry clone (PHP20234, FIG. 9, SEQ ID NO:9) into the destination vector PHP33692 (FIG. 20, SEQ ID NO:63). The destination vector PHP33692 adds to the final vectors created above also an:

[0411] 1) LTP2 promoter::red fluorescent protein::PinII terminator cassette for Z. mays seed sorting

[0412] 2) a Ubiquitin promoter::moPAT::PinII terminator cassette for transformation selection.

The resulting vector was named PHP36957.

### Example 15A

### Preparation of the Destination Vectors PHP23236 and PHP29635 and PHP29634 for Transformation of Gaspe Flint Derived Maize Lines

[0413] Destination vector PHP23236 (FIG. 6, SEQ ID NO:6) was obtained by transformation of Agrobacterium strain LBA4404 containing plasmid PHP10523 (FIG. 7, SEQ ID NO:7) with plasmid PHP23235 (FIG. 8, SEQ ID NO:8) and isolation of the resulting co-integration product.

[0414] Destination vector PHP23236, can be used in a recombination reaction with an entry clone as described in Example 16 to create a maize expression vector for transformation of Gaspe Flint derived maize lines. Expression of the gene of interest is under control of the ubiquitin promoter (SEQ ID NO:21). PHP29635 (FIG. 13, SEQ ID NO:13) was obtained by transformation of Agrobacterium strain LBA4404 containing plasmid PHP10523 with plasmid PIIOXS2a-FRT87(ni)m (FIG. 14, SEQ ID NO:18) and isolation of the resulting co-integration product. Destination vector PHP29635 can be used in a recombination reaction with an entry clone as described in Example 16 to create a maize expression vector for transformation of Gaspe Flint derived maize lines. Expression of the gene of interest is under control of the S2A promoter (SEQ ID NO:22).

[0415] Destination vector PHP29634 is similar to destination vector PHP23236, however, destination vector PHP29634 has site-specific recombination sites FRT1 and FRT87 and also encodes the GAT4602 selectable marker protein for selection of transformants using glyphosate. This expression vector contains the cDNA of interest, encoding AtFeC-II, under control of the UBI promoter and is a T-DNA binary vector for Agrobacterium-mediated transformation into corn as described, but not limited to, the examples described herein.

### Example 15B

### Preparation of the Destination Vectors PHP28647 and PHP33692 for Transformation Maize Lines

[0416] Destination vector PHP28647 (FIG. 19, SEQ ID NO:62) was obtained by transformation of Agrobacterium strain LBA4404 containing plasmid PHP19770 (FIG. 21, SEQ ID NO:64) with plasmid PHP21737 (FIG. 22, SEQ ID NO:65) and isolation of the resulting co-integration product. Destination vector PHP28647, can be used in a recombination reaction with an entry clone as described in Example 16 to create a maize expression vector for transformation of maize lines. Expression of the gene of interest is under control of the ubiquitin promoter (SEQ ID NO:21).

[0417] Destination vector PHP33692 was created from plasmid PHP29558 (FIG. 23; SEQ ID NO:66) with a LTP2promoter::red fluorescent protein::PinII terminator cassette, introduced by restriction digestion and ligation. Moreover, destination vector PHP33692 has site-specific recombination sites FRT1, FRT5 and FRT12, as well as LoxP. Destination vector PHP33692 can be used in a recombination reaction with an entry clone as described in Example 16 to create a maize expression vector for transformation of maize lines. Expression of the gene of interest is under control of the NAS2 promoter (SEQ ID NO:19).

### Example 16

### Preparation of Plasmids for Transformation of Gaspe Flint Derived and Other Maize Lines

[0418] Using Invitrogen™ Gateway® Recombination technology, entry clones containing the Arabidopsis lpk gene (AT5G60270) or a maize lpk homolog can be created, as described in Examples 5A and 9 and used to directionally clone each gene into destination vector PHP23236 or PHP28647 (Example 15A and B, respectively) for expression under the ubiquitin promoter or into destination vector PHP29635 (Example 15A) for expression under the S2A promoter or into destination vector PHP29634 (Example 15A) or destination vector PHP33692 (example 15B) for expression under the NAS2 promoter. Each of the expression vectors are T-DNA binary vectors for Agrobacterium-mediated transformation into corn.

[0419] Gaspe Flint Derived Maize Lines or other maize lines can be transformed with the expression constructs as described in Example 17.

### Example 17

### Transformation of Gaspe Flint Derived Maize Lines or Other Maize Lines with Validated Arabidopsis Lead Genes and Corresponding Homologs from Other Species

[0420] Maize plants can be transformed as described in Example 16 to overexpress the Arabidopsis AT5G60270 gene and the corresponding homologs from other species, such as the ones listed in Table 1 and SEQ ID NOs: 47, 48, 49, 50, 51, 52, 53, 54, 55, 56, 57, 58, and 59, in order to examine the resulting phenotype. In addition to the promoters described in Example 16 other promoters such the S2B promoter, the maize ROOTMET2 promoter, the maize Cyclo, the CR1BIO, the CRWAQ81 and the maize ZRP2.4447 are useful for directing expression of lpk genes in maize. Furthermore, a variety of terminators, such as, but not limited to the PINII terminator, can be used to achieve expression of the gene of interest in Gaspe Flint Derived Maize Lines.

[0421] Recipient Plants

[0422] Recipient plant cells can be from a uniform maize line having a short life cycle (“fast cycling”), a reduced size, and high transformation potential. Typical of these plant cells for maize are plant cells from any of the publicly available Gaspe Flint (GBF) line varieties. One possible candidate plant line variety is the F1 hybrid of GBF×QTM (Quick Turnaround Maize, a publicly available form of Gaspe Flint selected for growth under greenhouse conditions) disclosed in Tomes et al. U.S. Patent Application Publication No. 2003/0221212. Transgenic plants obtained from this line are of such a reduced size that they can be grown in four inch pots (¼ the space needed for a normal sized maize plant) and mature in less than 2.5 months. (Traditionally 3.5 months is required to obtain transgenic T0 seed once the transgenic plants are acclimated to the greenhouse.) Another suitable line is a double haploid line of GS3 (a highly transformable line) X Gaspe Flint. Yet another suitable line is a transformable elite inbred line carrying a transgene which causes early flowering, reduced stature, or both.

[0423] Transformation Protocol

[0424] Any suitable method may be used to introduce the transgenes into the maize cells, including but not limited to inoculation type procedures using Agrobacterium based vectors as described in Example 9. Transformation may be performed on immature embryos of the recipient (target) plant.

[0425] Precision Growth and Plant Tracking

[0426] The event population of transgenic (T0) plants resulting from the transformed maize embryos is grown in a controlled greenhouse environment using a modified randomized block design to reduce or eliminate environmental error. A randomized block design is a plant layout in which the experimental plants are divided into groups (e.g., thirty plants per group), referred to as blocks, and each plant is randomly assigned a location with the block.

[0427] For a group of thirty plants, twenty-four transformed, experimental plants and six control plants (plants with a set phenotype) (collectively, a “replicate group”) are placed in pots which are arranged in an array (a.k.a. a replicate group or block) on a table located inside a greenhouse. Each plant, control or experimental, is randomly assigned to a location with the block which is mapped to a unique, physical greenhouse location as well as to the replicate group. Multiple replicate groups of thirty plants each may be grown in the same greenhouse in a single experiment. The layout (arrangement) of the replicate groups should be determined to minimize space requirements as well as environmental effects within the greenhouse. Such a layout may be referred to as a compressed greenhouse layout.

[0428] An alternative to the addition of a specific control group is to identify those transgenic plants that do not express the gene of interest. A variety of techniques such as RT-PCR can be applied to quantitatively assess the expression level of the introduced gene. T0 plants that do not express the transgene can be compared to those which do.

[0429] Each plant in the event population is identified and tracked throughout the evaluation process, and the data gathered from that plant is automatically associated with that plant so that the gathered data can be associated with the transgene carried by the plant. For example, each plant container can have a machine readable label (such as a Universal Product Code (UPC) bar code) which includes information about the plant identity, which in turn is correlated to a greenhouse location so that data obtained from the plant can be automatically associated with that plant.

[0430] Alternatively any efficient, machine readable, plant identification system can be used, such as two-dimensional matrix codes or even radio frequency identification tags (RFID) in which the data is received and interpreted by a radio frequency receiver/processor. See U.S. Published Patent Application No. 2004/0122592, incorporated herein by reference.

[0431] Phenotypic Analysis Using Three-Dimensional Imaging

[0432] Each greenhouse plant in the T0 event population, including any control plants, is analyzed for agronomic characteristics of interest, and the agronomic data for each plant is recorded or stored in a manner so that it is associated with the identifying data (see above) for that plant. Confirmation of a phenotype (gene effect) can be accomplished in the T1 generation with a similar experimental design to that described above.

[0433] The T0 plants are analyzed at the phenotypic level using quantitative, non-destructive imaging technology throughout the plant's entire greenhouse life cycle to assess the traits of interest. A digital imaging analyzer is used for automatic multi-dimensional analyzing of total plants. The imaging may be done inside the greenhouse. Two camera systems, located at the top and side, and an apparatus to rotate the plant, are used to view and image plants from all sides. Images are acquired from the top, front and side of each plant. All three images together provide sufficient information to evaluate the biomass, size and morphology of each plant.

[0434] Due to the change in size of the plants from the time the first leaf appears from the soil to the time the plants are at the end of their development, the early stages of plant development are best documented with a higher magnification from the top. This may be accomplished by using a motorized zoom lens system that is fully controlled by the imaging software.

[0435] In a single imaging analysis operation, the following events occur: (1) the plant is conveyed inside the analyzer area, rotated 360 degrees so its machine readable label can be read, and left at rest until its leaves stop moving; (2) the side image is taken and entered into a database; (3) the plant is rotated 90 degrees and again left at rest until its leaves stop moving, and (4) the plant is transported out of the analyzer.

[0436] Plants are allowed at least six hours of darkness per twenty four hour period in order to have a normal day/night cycle.

[0437] Imaging Instrumentation

[0438] Any suitable imaging instrumentation may be used, including but not limited to light spectrum digital imaging instrumentation commercially available from LemnaTec GmbH of Wurselen, Germany. The images are taken and analyzed with a LemnaTec Scanalyzer HTS LT-0001-2 having a ½″ IT Progressive Scan IEE CCD imaging device. The imaging cameras may be equipped with a motor zoom, motor aperture and motor focus. All camera settings may be made using LemnaTec software. The instrumental variance of the imaging analyzer is less than about 5% for major components and less than about 10% for minor components.

[0439] Software

[0440] The imaging analysis system comprises a LemnaTec HTS Bonit software program for color and architecture analysis and a server database for storing data from about 500,000 analyses, including the analysis dates. The original images and the analyzed images are stored together to allow the user to do as much reanalyzing as desired. The database can be connected to the imaging hardware for automatic data collection and storage. A variety of commercially available software systems (e.g. Matlab, others) can be used for quantitative interpretation of the imaging data, and any of these software systems can be applied to the image data set.

[0441] Conveyor System

[0442] A conveyor system with a plant rotating device may be used to transport the plants to the imaging area and rotate them during imaging. For example, up to four plants, each with a maximum height of 1.5 m, are loaded onto cars that travel over the circulating conveyor system and through the imaging measurement area. In this case the total footprint of the unit (imaging analyzer and conveyor loop) is about 5 m×5 m.

[0443] The conveyor system can be enlarged to accommodate more plants at a time. The plants are transported along the conveyor loop to the imaging area and are analyzed for up to 50 seconds per plant. Three views of the plant are taken. The conveyor system, as well as the imaging equipment, should be capable of being used in greenhouse environmental conditions.

[0444] Illumination

[0445] Any suitable mode of illumination may be used for the image acquisition. For example, a top light above a black background can be used. Alternatively, a combination of top- and backlight using a white background can be used. The illuminated area should be housed to ensure constant illumination conditions. The housing should be longer than the measurement area so that constant light conditions prevail without requiring the opening and closing or doors. Alternatively, the illumination can be varied to cause excitation of either transgene (e.g., green fluorescent protein (GFP), red fluorescent protein (RFP)) or endogenous (e.g. Chlorophyll) fluorophores.

[0446] Biomass Estimation Based on Three-Dimensional Imaging

[0447] For best estimation of biomass the plant images should be taken from at least three axes, such as the top and two side (sides 1 and 2) views. These images are then analyzed to separate the plant from the background, pot and pollen control bag (if applicable). The volume of the plant can be estimated by the calculation:

Volume(voxels)=\sqrt{TopArea(pixels)}×\sqrt{Side1Area(pixels)}×\sqrt{Side2Area(pixels)}

[0448] In the equation above the units of volume and area are “arbitrary units”. Arbitrary units are entirely sufficient to detect gene effects on plant size and growth in this system because what is desired is to detect differences (both positive-larger and negative-smaller) from the experimental mean, or control mean. The arbitrary units of size (e.g. area) may be trivially converted to physical measurements by the addition of a physical reference to the imaging process. For instance, a physical reference of known area can be included in both top and side imaging processes. Based on the area of these physical references a conversion factor can be determined to allow conversion from pixels to a unit of area such as square centimeters (cm²). The physical reference may or may not be an independent sample. For instance, the pot, with a known diameter and height, could serve as an adequate physical reference.

[0449] Color Classification

[0450] The imaging technology may also be used to determine plant color and to assign plant colors to various color classes. The assignment of image colors to color classes is an inherent feature of the LemnaTec software. With other image analysis software systems color classification may be determined by a variety of computational approaches.

[0451] For the determination of plant size and growth parameters, a useful classification scheme is to define a simple color scheme including two or three shades of green and, in addition, a color class for chlorosis, necrosis and bleaching, should these conditions occur. A background color class which includes non plant colors in the image (for example pot and soil colors) is also used and these pixels are specifically excluded from the determination of size. The plants are analyzed under controlled constant illumination so that any change within one plant over time, or between plants or different batches of plants (e.g. seasonal differences) can be quantified.

[0452] In addition to its usefulness in determining plant size growth, color classification can be used to assess other yield component traits. For these other yield component traits additional color classification schemes may be used. For instance, the trait known as “staygreen”, which has been associated with improvements in yield, may be assessed by a color classification that separates shades of green from shades of yellow and brown (which are indicative of senescing tissues). By applying this color classification to images taken toward the end of the T0 or T1 plants' life cycle, plants that have increased amounts of green colors relative to yellow and brown colors (expressed, for instance, as Green/Yellow Ratio) may be identified. Plants with a significant difference in this Green/Yellow ratio can be identified as carrying transgenes which impact this important agronomic trait.

[0453] The skilled plant biologist will recognize that other plant colors arise which can indicate plant health or stress response (for instance anthocyanins), and that other color classification schemes can provide further measures of gene action in traits related to these responses.

### Plant Architecture Analysis

[0454] Transgenes which modify plant architecture parameters may also be identified using the present invention, including such parameters as maximum height and width, internodal distances, angle between leaves and stem, number of leaves starting at nodes and leaf length. The LemnaTec system software may be used to determine plant architecture as follows. The plant is reduced to its main geometric architecture in a first imaging step and then, based on this image, parameterized identification of the different architecture parameters can be performed. Transgenes that modify any of these architecture parameters either singly or in combination can be identified by applying the statistical approaches previously described.

[0455] Pollen Shed Date

[0456] Pollen shed date is an important parameter to be analyzed in a transformed plant, and may be determined by the first appearance on the plant of an active male flower. To find the male flower object, the upper end of the stem is classified by color to detect yellow or violet anthers. This color classification analysis is then used to define an active flower, which in turn can be used to calculate pollen shed date.

[0457] Alternatively, pollen shed date and other easily visually detected plant attributes (e.g. pollination date, first silk date) can be recorded by the personnel responsible for performing plant care. To maximize data integrity and process efficiency this data is tracked by utilizing the same barcodes utilized by the LemnaTec light spectrum digital analyzing device. A computer with a barcode reader, a palm device, or a notebook PC may be used for ease of data capture recording time of observation, plant identifier, and the operator who captured the data.

[0458] Orientation of the Plants

[0459] Mature maize plants grown at densities approximating commercial planting often have a planar architecture. That is, the plant has a clearly discernable broad side, and a narrow side. The image of the plant from the broadside is determined. To each plant a well defined basic orientation is assigned to obtain the maximum difference between the broadside and edgewise images. The top image is used to determine the main axis of the plant, and an additional rotating device is used to turn the plant to the appropriate orientation prior to starting the main image acquisition.

### Example 18A

### Screening of Maize Lines Under Nitrogen Limiting Conditions

[0460] Some transgenic plants will contain two or three doses of Gaspe Flint-3 with one dose of GS3 (GS3/(Gaspe-3)2× or GS3/(Gaspe-3)3×) and will segregate 1:1 for a dominant transgene. Other transgenic plants will be regular inbreds and will be used in top crosses to generate test hybrids. Plants will be planted in Turface, a commercial potting medium, and watered four times each day with 1 mM KNO₃ growth medium and with 2 mM KNO₃, or higher, growth medium (see FIG. 17). Control plants grown in 1 mM KNO₃ medium will be less green, produce less biomass and have a smaller ear at anthesis. Gaspe-derived lines will be grown to flowering stage whereas regular inbreds and hybrids will be grown to V4 to V5 stages.

[0461] Statistics are used to decide if differences seen between treatments are significantly different. FIG. 18 illustrates one method which places letters after the values. Those values in the same column that have the same letter (not group of letters) following them are not significantly different. Using this method, if there are no letters following the values in a column, then there are no significant differences between any of the values in that column or, in other words, all the values in that column are equal. Expression of a transgene will result in plants with improved plant growth in 1 mM KNO₃ when compared to a transgenic null. Thus biomass and greenness data (as described in Example 17) will be collected at time of sampling (anthesis for Gaspe and V4-V5 for others) and compared to a transgenic null. In addition, total nitrogen in the plants will be analyzed in ground tissues. Improvements in growth, greenness, nitrogen accumulation and ear size at anthesis will be indications of increased nitrogen use efficiency.

[0462] Seedling Assay

[0463] Transgenic maize plants can also be evaluated using a seedling assay that assesses plant performance under nitrogen limiting conditions. In an 18 day seedling assay, for example, transgenic plants are planted in Turface, a commercial potting medium, and then watered four times each day with a solution containing the following nutrients: 1 mM CaCl₂, 2 mM MgSO₄, 0.5 mM KH₂PO₄, 83 ppm Sprint330, 3 mM KCl, 1 mM KNO₃, 1 μM ZnSO₄, 1 μM MnCl₂, 3 μM H₃BO₄, 0.1 μM CuSO₄, and 0.1 μM NaMoO₄. Plants are harvested 18 days after planting, and a number of traits are assessed, including but not limited to: SPAD (greenness), stem diameter, root dry weight, shoot dry weight, total dry weight, mg Nitrogen per grams of dry weight (mg N/g dwt), and plant N concentration. Means are compared to null mean parameters using a Student's t test with a minimum (P<t) of 0.1.

### Example 18B

### Nitrogen Utilization Efficiency Seedling Assay

[0464] Seed of transgenic events were separated into Transgenic (Treatment 1; contains construct PHP31272) and Null (Treatment 2) seed using a seed color marker.

[0465] Treatments (Transgenic or Bulked Null) were each randomly assigned to blocks of 54 pots (experimental units) arranged in 6 rows by 9 columns. Each treatment (Transgenic or Bulked Nulls) was replicated 9 times.

[0466] All seeds were planted in 4 inch, square pots containing Turface on 8 inch, staggered centers and watered four times each day with a solution containing the following nutrients:

| | | | |
|---|---|---|---|
| 1 mM CaCl₂ | 2 mM MgSO₄ | 0.5 mM KH₂PO₄ | 83 ppm Sprint330 |
| 3 mM KCl | 1 mM KNO₃ | 1 μM ZnSO₄ | 1 μM MnCl₂ |
| 3 μM H₃BO₄ | 1 μM MnCl₂ | 0.1 μM CuSO₄ | 0.1 μM NaMoO₄ |

After emergence the plants were thinned to one seed per pot. At harvest, plants were removed from the pots, and the Turface was washed from the roots. The roots were separated from the shoot, placed in a paper bag, and dried at 70° C. for 70 hr. The dried plant parts (roots and shoots) were weighed and placed in a 50 ml conical tube with approximately 20 5/32 inch steel balls and then ground by shaking in a paint shaker.

[0467] The Nitrogen/Protein Analyzer from Thermo Electron Corporation (model FlashEA 1112 N) uses approximately 30 mg of the ground tissue. A sample is dropped from the Autosampler into the crucible inside the oxidation reactor chamber. At 900° C. and pure oxygen, the sample is oxidized by a strong exothermic reaction creating a gas mixture of N₂, CO₂, H₂O, and SO₂. After the combustion is complete, the carrier gas helium is turned on and the gas mixture flows into the reduction reaction chamber. At 680° C., the gas mixture flows across the reduction copper where nitrogen oxides possibly formed are converted into elemental nitrogen and the oxygen excess is retained. From the reduction reactor, the gas mixture flows across a series of two absorption filters. The first filter contains soda lime and retains carbon and sulfur dioxides. The second filter contains molecular sieves and granular silica gel to hold back water. Nitrogen is then eluted in the chromatographic column and conveyed to the thermal conductivity detector that generates an electrical signal, which, properly processed by the Eager 300 software, provides the nitrogen-protein percentage.

[0468] Using these data, the following parameters were measured and means of Transgenic parameters were compared to means of Null parameters using a Student's t test:

| | |
|---|---|
| Total Plant Biomass | (total dwt (g)) |
| Root Biomass | (root dwt (g)) |
| Shoot Biomass | (shoot dwt (g)) |
| Root/Shoot Ratio | (root:shoot dwt ratio) |
| Plant N concentration | (mg N/g dwt) |
| Total Plant N | (total N (mg)) |

[0469] Variance was calculated within each block using an Analysis of Variance (ANOVA) calculation and a completely random design (CRD) model. An overall treatment effect for each block was calculated using an F statistic by dividing overall block treatment mean square by the overall block error mean square. The probability of a greater Student's t test was calculated for each transgenic mean compared to the appropriate null. Variables that show a significant difference (*) have a minimum (P<t) of 0.1.

[0470] Table 5 shows the data and the two tailed Student's t probability for plants containing construct PHP31272. Comparisons were made between the transgenic events and construct nulls planted on 9/1. A construct null is a negative entry that is made up of a sampling of kernels from the negative segregants and is therefore a representative sample of all negatives.

TABLE 5
Greenhouse Seedling Assay Data for PHP31272

| Planting | | | | | | | |
|---|---|---|---|---|---|---|---|
| date | Event Name | Mean | Null | t Test | Mean | Null | t Test |
| | | root dwt (g) | | | shoot dwt (g) | | |
| Sep. 1, 2010 | E7899.41.1.1 | 0.373 | 0.421 | 0.116 | 0.59 | 0.612 | 0.662 |
| Sep. 1, 2010 | E7899.41.1.3 | 0.403 | 0.405 | 0.945 | 0.539 | 0.518 | 0.676 |
| Sep. 1, 2010 | E7899.41.1.4 | 0.396 | 0.341 | 0.064 | 0.575 | 0.511 | 0.204 |
| Sep. 1, 2010 | E7899.41.2.13 | 0.399 | 0.378 | 0.476 | 0.559 | 0.574 | 0.765 |
| Sep. 1, 2010 | E7899.41.2.18 | 0.39 | 0.405 | 0.609 | 0.51 | 0.561 | 0.311 |
| Sep. 1, 2010 | E7899.41.2.2 | 0.43 | 0.434 | 0.892 | 0.617 | 0.555 | 0.226 |
| Sep. 1, 2010 | E7899.41.2.4 | 0.438 | 0.45 | 0.684 | 0.542 | 0.58 | 0.450 |
| Sep. 1, 2010 | E7899.41.4.9 | 0.426 | 0.39 | 0.260 | 0.52 | 0.543 | 0.647 |
| Sep. 1, 2010 | E7899.41.5.2 | 0.438 | 0.426 | 0.798 | 0.56 | 0.587 | 0.606 |
| Sep. 1, 2010 | E7899.41.1.1 | 0.542 | 0.559 | 0.711 | 1.312 | 1.364 | 0.636 |
| Sep. 1, 2010 | E7899.41.1.3 | 0.554 | 0.6 | 0.316 | 1.469 | 1.39 | 0.470 |
| Sep. 1, 2010 | E7899.41.1.4 | 0.604 | 0.606 | 0.980 | 1.434 | 1.513 | 0.473 |
| Sep. 1, 2010 | E7899.41.2.13 | 0.621 | 0.534 | 0.075 | 1.462 | 1.386 | 0.511 |
| Sep. 1, 2010 | E7899.41.2.18 | 0.615 | 0.497 | 0.015 | 1.28 | 1.332 | 0.643 |
| Sep. 1, 2010 | E7899.41.2.2 | 0.662 | 0.587 | 0.139 | 1.81 | 1.478 | 0.003 |
| Sep. 1, 2010 | E7899.41.2.4 | 0.586 | 0.591 | 0.913 | 1.37 | 1.298 | 0.558 |
| Sep. 1, 2010 | E7899.41.4.9 | 0.588 | 0.518 | 0.145 | 1.511 | 1.381 | 0.239 |
| Sep. 1, 2010 | E7899.41.5.2 | 0.553 | 0.588 | 0.445 | 1.307 | 1.39 | 0.451 |
| Sep. 1, 2010 | E7899.41.1.1 | 0.494 | 0.553 | 0.058 | 1.165 | 1.207 | 0.649 |
| Sep. 1, 2010 | E7899.41.1.3 | 0.431 | 0.49 | 0.076 | 1.007 | 1.079 | 0.436 |
| Sep. 1, 2010 | E7899.41.1.4 | 0.446 | 0.505 | 0.086 | 1.026 | 1.269 | 0.010 |
| Sep. 1, 2010 | E7899.41.2.13 | 0.475 | 0.491 | 0.581 | 1.137 | 1.206 | 0.456 |
| Sep. 1, 2010 | E7899.41.2.18 | 0.471 | 0.486 | 0.655 | 1.174 | 1.153 | 0.820 |
| Sep. 1, 2010 | E7899.41.2.2 | 0.528 | 0.5 | 0.335 | 1.217 | 1.213 | 0.936 |
| Sep. 1, 2010 | E7899.41.2.4 | 0.472 | 0.477 | 0.863 | 1.085 | 1.065 | 0.828 |
| Sep. 1, 2010 | E7899.41.4.9 | 0.487 | 0.511 | 0.446 | 1.071 | 1.165 | 0.341 |
| Sep. 1, 2010 | E7899.41.5.2 | 0.477 | 0.43 | 0.107 | 1.138 | 1.117 | 0.786 |
| | | total dwt (g) | | | root:shoot dwt ratio | | |
| Sep. 1, 2010 | E7899.41.1.1 | 0.987 | 1.033 | 0.531 | 0.678 | 0.695 | 0.685 |
| Sep. 1, 2010 | E7899.41.1.3 | 0.942 | 0.923 | 0.795 | 0.773 | 0.800 | 0.512 |
| Sep. 1, 2010 | E7899.41.1.4 | 0.971 | 0.852 | 0.107 | 0.694 | 0.674 | 0.639 |
| Sep. 1, 2010 | E7899.41.2.13 | 0.958 | 0.952 | 0.934 | 0.730 | 0.667 | 0.149 |
| Sep. 1, 2010 | E7899.41.2.18 | 0.881 | 0.977 | 0.209 | 0.769 | 0.813 | 0.328 |
| Sep. 1, 2010 | E7899.41.2.2 | 1.061 | 0.989 | 0.349 | 0.715 | 0.807 | 0.040 |
| Sep. 1, 2010 | E7899.41.2.4 | 0.98 | 0.968 | 0.869 | 0.813 | 0.782 | 0.463 |
| Sep. 1, 2010 | E7899.41.4.9 | 0.922 | 0.933 | 0.880 | 0.785 | 0.719 | 0.126 |
| Sep. 1, 2010 | E7899.41.5.2 | 0.998 | 1.013 | 0.825 | 0.789 | 0.730 | 0.218 |
| Sep. 1, 2010 | E7899.41.1.1 | 1.829 | 1.923 | 0.541 | 0.401 | 0.406 | 0.816 |
| Sep. 1, 2010 | E7899.41.1.3 | 2.023 | 2.044 | 0.891 | 0.357 | 0.413 | 0.023 |
| Sep. 1, 2010 | E7899.41.1.4 | 2.02 | 2.149 | 0.402 | 0.411 | 0.427 | 0.501 |
| Sep. 1, 2010 | E7899.41.2.13 | 2.188 | 1.92 | 0.091 | 0.383 | 0.387 | 0.861 |
| Sep. 1, 2010 | E7899.41.2.18 | 1.873 | 1.854 | 0.909 | 0.434 | 0.377 | 0.022 |
| Sep. 1, 2010 | E7899.41.2.2 | 2.504 | 2.096 | 0.008 | 0.385 | 0.397 | 0.603 |
| Sep. 1, 2010 | E7899.41.2.4 | 1.956 | 1.872 | 0.623 | 0.421 | 0.423 | 0.884 |
| Sep. 1, 2010 | E7899.41.4.9 | 2.099 | 1.86 | 0.131 | 0.391 | 0.404 | 0.595 |
| Sep. 1, 2010 | E7899.41.5.2 | 1.86 | 1.978 | 0.443 | 0.424 | 0.425 | 0.958 |
| Sep. 1, 2010 | E7899.41.1.1 | 1.672 | 1.742 | 0.545 | 0.439 | 0.455 | 0.442 |
| Sep. 1, 2010 | E7899.41.1.3 | 1.438 | 1.558 | 0.300 | 0.451 | 0.445 | 0.774 |
| Sep. 1, 2010 | E7899.41.1.4 | 1.472 | 1.782 | 0.008 | 0.427 | 0.405 | 0.305 |
| Sep. 1, 2010 | E7899.41.2.13 | 1.612 | 1.697 | 0.462 | 0.423 | 0.394 | 0.253 |
| Sep. 1, 2010 | E7899.41.2.18 | 1.665 | 1.578 | 0.464 | 0.412 | 0.422 | 0.668 |
| Sep. 1, 2010 | E7899.41.2.2 | 1.738 | 1.718 | 0.851 | 0.422 | 0.419 | 0.962 |
| Sep. 1, 2010 | E7899.41.2.4 | 1.557 | 1.542 | 0.896 | 0.440 | 0.427 | 0.682 |
| Sep. 1, 2010 | E7899.41.4.9 | 1.558 | 1.676 | 0.338 | 0.453 | 0.442 | 0.610 |
| Sep. 1, 2010 | E7899.41.5.2 | 1.615 | 1.551 | 0.548 | 0.435 | 0.372 | 0.010 |
| | | mg N/g dwt | | | total N (mg) | | |
| Sep. 1, 2010 | E7899.41.1.1 | 17.56 | 18.48 | 0.233 | 10.383 | 11.283 | 0.237 |
| Sep. 1, 2010 | E7899.41.1.3 | 19.67 | 18.51 | 0.105 | 11.967 | 09.520 | 0.000 |
| Sep. 1, 2010 | E7899.41.1.4 | 19.4 | 20.01 | 0.428 | 11.176 | 10.395 | 0.285 |
| Sep. 1, 2010 | E7899.41.2.13 | 17.89 | 18.61 | 0.350 | 10.476 | 10.593 | 0.853 |
| Sep. 1, 2010 | E7899.41.2.18 | 19.05 | 17.62 | 0.065 | 09.658 | 09.147 | 0.524 |
| Sep. 1, 2010 | E7899.41.2.2 | 17.66 | 17.41 | 0.745 | 10.228 | 09.655 | 0.474 |
| Sep. 1, 2010 | E7899.41.2.4 | 18.75 | 19.75 | 0.195 | 10.100 | 11.211 | 0.145 |
| Sep. 1, 2010 | E7899.41.4.9 | 19.42 | 19.59 | 0.825 | 10.040 | 10.574 | 0.482 |
| Sep. 1, 2010 | E7899.41.5.2 | 17.72 | 18.54 | 0.425 | 10.184 | 11.124 | 0.275 |
| Sep. 1, 2010 | E7899.41.1.1 | 42.06 | 41.5 | 0.567 | 53.532 | 54.703 | 0.763 |
| Sep. 1, 2010 | E7899.41.1.3 | 40.44 | 41.37 | 0.426 | 58.946 | 59.222 | 0.943 |
| Sep. 1, 2010 | E7899.41.1.4 | 41.47 | 41.02 | 0.757 | 59.272 | 60.254 | 0.800 |
| Sep. 1, 2010 | E7899.41.2.13 | 40.58 | 42.01 | 0.221 | 64.020 | 58.205 | 0.145 |
| Sep. 1, 2010 | E7899.41.2.18 | 41.02 | 42.13 | 0.342 | 52.228 | 55.906 | 0.358 |
| Sep. 1, 2010 | E7899.41.2.2 | 40.15 | 40.41 | 0.724 | 74.094 | 59.480 | 0.0003 |
| Sep. 1, 2010 | E7899.41.2.4 | 40.76 | 42.41 | 0.216 | 55.420 | 59.619 | 0.282 |
| Sep. 1, 2010 | E7899.41.4.9 | 40.72 | 40.35 | 0.761 | 60.976 | 55.439 | 0.166 |
| Sep. 1, 2010 | E7899.41.5.2 | 42.26 | 42.45 | 0.961 | 55.202 | 56.859 | 0.681 |
| Sep. 1, 2010 | E7899.41.1.1 | 48.97 | 48.77 | 0.821 | 56.185 | 59.121 | 0.491 |
| Sep. 1, 2010 | E7899.41.1.3 | 50.01 | 50.22 | 0.814 | 50.074 | 54.124 | 0.343 |
| Sep. 1, 2010 | E7899.41.1.4 | 49.98 | 49.14 | 0.357 | 51.739 | 62.118 | 0.016 |
| Sep. 1, 2010 | E7899.41.2.13 | 50.38 | 49.88 | 0.581 | 56.272 | 60.068 | 0.374 |
| Sep. 1, 2010 | E7899.41.2.18 | 50.61 | 49.51 | 0.221 | 59.342 | 54.940 | 0.315 |
| Sep. 1, 2010 | E7899.41.2.2 | 48.78 | 48.97 | 0.830 | 59.166 | 57.761 | 0.740 |
| Sep. 1, 2010 | E7899.41.2.4 | 50.34 | 50.98 | 0.514 | 54.410 | 53.979 | 0.919 |
| Sep. 1, 2010 | E7899.41.4.9 | 50.1 | 50.05 | 0.955 | 54.203 | 58.306 | 0.365 |
| Sep. 1, 2010 | E7899.41.5.2 | 50.05 | 51 | 0.290 | 56.175 | 57.152 | 0.851 |

### Example 19A

### Yield Analysis of Maize Lines with Validated Arabidopsis Lead Gene (AT5G60270)

[0471] A recombinant DNA construct containing a validated Arabidopsis gene can be introduced into a maize line either by direct transformation or introgression from a separately transformed line.

[0472] Transgenic plants, either inbred or hybrid, can undergo more vigorous field-based experiments to study yield enhancement and/or stability under various environmental conditions, such as variations in water and nutrient availability (e.g. nitrogen limiting and non-limiting conditions). A standardized yield trial will typically include 4 to 6 replications and at least 4 locations.

[0473] Subsequent yield analysis can be done to determine whether plants that contain the validated Arabidopsis lead gene have an improvement in yield performance under various environmental conditions (e.g. under nitrogen limiting or non-limiting conditions), when compared to the control plants that do not contain the validated Arabidopsis lead or a maize homolog of the gene. Reduction in yield can be measured for both. Plants containing the validated Arabidopsis lead gene have less yield loss relative to the control plants, for example 50% less yield loss.

### Example 19B

### Yield Analysis of Maize Lines Transformed with PHP31272 and PHP37086

[0474] Corn hybrid testcrosses, containing the Arabidopsis thaliana lead gene (encoding a lectin protein kinase polypeptide) expression cassette present in vector PHP31272 and PHP37086, and their controls were grown in low nitrogen (LN) and normal nitrogen (NN) environments at multiple locations. A low nitrogen (LN) environment consists of a less than normal amount of nitrogen fertilizer applied in early spring or summer, whereas a normal nitrogen (NN) environment consists of adding adequate nitrogen for normal yields, based on soil test standards established for specific growing areas by Federal and State Extension services. For the analysis, a construct null was a negative entry made up of negative segregants from all events within a construct, and a bulk null was a negative entry made up of all negative segregants from all constructs within an experiment.

[0475] For PHP31272 nine transgenic events were field tested for LN and NN in 2008 at two locations (LN2 and NN2, respectively), York, Nebr. (YK) and Woodland, Calif. (WO). In 2009 the nine transgenic events were field tested in three locations (LN3), Marion, Iowa (MR), York, Nebr. (YK) and Woodland, Calif. (WO), for LN and at four locations (NN4), Marion, Iowa (MR), York, Nebr. (YK), Woodland, Calif. (WO), and Princeton, Ill. (PR) for NN. In 2010 the nine transgenic events were field tested for three locations (LN3) for LN and at two locations (NN2) for NN. For PHP37086 ten transgenic events were field tested for LN and NN in 2010 at three locations for LN and at two locations for NN. Yield was assessed and compared and calculated across locations for each year. The corn hybrid testcrosses were compared to the nulls (either bulk null or construct null). The summary of the results of the field tests are presented in Table 6 (PHP31272) and Table 7 (PHP37086).

TABLE 6
2008, 2009 and 2010 Field Tests of Maize Transformed with PHP31272

[chemical structure]

Unit of measure is bushels/acre
Shading represents sig. higher (P < 0.1) results compared to the null.
Bold represents significant lower (P < 0.1) result compared to the null.

TABLE 7
2010 Field Test of Maize Transformed with PHP37086

| | MR | WO | JH | LN3 | MR NN | YK | NN2 |
|---|---|---|---|---|---|---|---|
| Event | LN | LN | LN | | | NN | |
| BN | 104 | 112 | 97 | 104 | 179 | 188 | 184 |
| E8828-47.1.19 | 104 | 110 | 97 | 104 | 178 | 187 | 184 |
| E8828-47.1.20 | 104 | 109 | 97 | 104 | 178 | 186 | 182 |
| E8828-47.1.5 | 104 | 108 | 97 | 104 | 180 | 186 | 183 |
| E8828-47.2.15 | 104 | 110 | 97 | 104 | 180 | 187 | 184 |
| E8828-47.2.19 | 104 | 111 | 97 | 104 | 177 | 187 | 182 |
| E8828-47.2.29 | 104 | 109 | 97 | 104 | 178 | 186 | 182 |
| E8828-47.2.6 | 104 | 108 | 97 | 104 | 177 | 186 | 182 |
| E8828-47.3.10 | 104 | 109 | 97 | 104 | 178 | 187 | 182 |
| E8828-47.3.13 | 104 | 110 | 97 | 104 | 178 | 186 | 182 |
| E8828-47.3.4 | 104 | 110 | 97 | 104 | 178 | 187 | 183 |

Unit of measure is bushels/acre.
Shading represents sig. higher (P < 0.1) result compared to the construct null (CN).
Bold represents sig. lower (P < 0.1) result compared to the construct null (CN).

### Example 20

### Assays to Determine Alterations of Root Architecture in Maize

[0476] Transgenic maize plants are assayed for changes in root architecture at seedling stage, flowering time or maturity. Assays to measure alterations of root architecture of maize plants include, but are not limited to the methods outlined below. To facilitate manual or automated assays of root architecture alterations, corn plants can be grown in clear pots.
[0477] 1) Root mass (dry weights). Plants are grown in Turface, a growth media that allows easy separation of roots. Oven-dried shoot and root tissues are weighed and a root/shoot ratio calculated.
[0478] 2) Levels of lateral root branching. The extent of lateral root branching (e.g. lateral root number, lateral root length) is determined by sub-sampling a complete root system, imaging with a flat-bed scanner or a digital camera and analyzing with WinRHIZO™ software (Regent Instruments Inc.).
[0479] 3) Root band width measurements. The root band is the band or mass of roots that forms at the bottom of greenhouse pots as the plants mature. The thickness of the root band is measured in mm at maturity as a rough estimate of root mass.
[0480] 4) Nodal root count. The number of crown roots coming off the upper nodes can be determined after separating the root from the support medium (e.g. potting mix). In addition the angle of crown roots and/or brace roots can be measured. Digital analysis of the nodal roots and amount of branching of nodal roots form another extension to the aforementioned manual method.
   All data taken on root phenotype are subjected to statistical analysis, normally a t-test to compare the transgenic roots with that of non-transgenic sibling plants. One-way ANOVA may also be used in cases where multiple events and/or constructs are involved in the analysis.

### Example 21

### Association Mapping Analysis

[0481] An association mapping strategy can be undertaken to identify markers associated with alterations in root architecture in maize.

[0482] Phenotypic scores for an alteration in root architecture or in at least one agronomic characteristic will be obtained. Lines with extreme phenotypes will be tested against genotypes in a whole genome association test (using 2×2 contingency tables with Fisher's exact test). A structure-based association analysis will be used, where the population structure is controlled using marker data. The model-based cluster analysis software, Structure, developed by Pritchard et al., (Genetics 155:945-959 (2000)) will be used with haplotype data for hundreds of elite maize inbreds at several hundred markers to estimate admixture coefficients and assign the inbreds to a number of subpopulations. This reduces the occurrence of false positives that can arise due to the effect of population structure on association mapping statistics. Kuiper's statistic for testing whether two distributions are the same was used to test a given marker for association between haplotype and phenotype in a given subpopulation (Press et al., Numerical Recipes in C, second edition, Cambridge University Press, NY (2002)).

[0483] At least one strong peak in at least one subpopulation is indicative of significant marker-trait associations (e.g. p<0.001). Marker positions are given in cM, with position zero being the first (most distal from the centromere) marker known at the beginning of a chromosome. These map positions are not absolute, and represent an estimate of map position based on the internally derived genetic map.

The application's sequence listing, which the Patent Office published only in electronic form, follows.

SEQUENCE LISTING (72 sequences)

SEQ ID NO: 1 - DNA, 18491 bp, artificial sequence
  vector
catgaatcaaacaaacatacacagcgacttattcacacgagctcaaattacaacggtatatatcctgccgtcgacaaccatggtctagacaggatccccgggtaccgagctcgaatttgcaggtcgactgcgtcatcccttacgtcagtggagatatcacatcaatccacttgctttgaagacgtggttggaacgtcttctttttccacgatgctcctcgtgggtgggggtccatctttgggaccactgtcggcagaggcatcttgaacgatagcctttcctttatcgcaatgatggcatttgtaggtgccaccttccttttctactgtccttttgatgaagtgacagatagctgggcaatggaatccgaggaggtttcccgatattaccctttgttgaaaagtctcaattgccctttggtcttctgagactgttgcgtcatcccttacgtcagtggagatatcacatcaatccacttgctttgaagacgtggttggaacgtcttctttttccacgatgctcctcgtgggtgggggtccatctttgggaccactgtcggcagaggcatcttgaacgatagcctttcctttatcgcaatgatggcatttgtaggtgccaccttccttttctactgtccttttgatgaagtgacagatagctgggcaatggaatccgaggaggtttcccgatattaccctttgttgaaaagtctcagttaacccgcgatcctgcgtcatcccttacgtcagtggagatatcacatcaatccacttgctttgaagacgtggttggaacgtcttctttttccacgatgctcctcgtgggtgggggtccatctttgggaccactgtcggcagaggcatcttgaacgatagcctttcctttatcgcaatgatggcatttgtaggtgccaccttccttttctactgtccttttgatgaagtgacagatagctgggcaatggaatccgaggaggtttcccgatattaccctttgttgaaaagtctcaattgccctttggtcttctgagactgttgcgtcatcccttacgtcagtggagatatcacatcaatccacttgctttgaagacgtggttggaacgtcttctttttccacgatgctcctcgtgggtgggggtccatctttgggaccactgtcggcagaggcatcttgaacgatagcctttcctttatcgcaatgatggcatttgtaggtgccaccttccttttctactgtccttttgatgaagtgacagatagctgggcaatggaatccgaggaggtttcccgatattaccctttgttgaaaagtctcagttaacccgcaattcactggccgtcgttttacaacgtcgtgactgggaaaaccctggcgttacccaacttaatcgccttgcagcacatccccctttcgccagctggcgtaatagcgaagaggcccgcaccgatcgcccttcccaacagttgcgcagcctgaatggcgaatggatcgatccgtcgatcgaccaaagcggccatcgtgcctccccactcctgcagttcgggggcatggatgcgcggatagccgctgctggtttcctggatgccgacggatttgcactgccggtagaactccgcgaggtcgtccagcctcaggcagcagctgaaccaactcgcgaggggatcgagcccctgctgagcctcgacatgttgtcgcaaaattcgccctggacccgcccaacgatttgtcgtcactgtcaaggtttgacctgcacttcatttggggcccacatacaccaaaaaaatgctgcataattctcggggcagcaagtcggttacccggccgccgtgctggaccgggttgaatggtgcccgtaactttcggtagagcggacggccaatactcaacttcaaggaatctcacccatgcgcgccggcggggaaccggagttcccttcagtgaacgttattagttcgccgctcggtgtgtcgtagatactagcccctggggccttttgaaatttgaataagatttatgtaatcagtcttttaggtttgaccggttctgccgctttttttaaaattggatttgtaataataaaacgcaattgtttgttattgtggcgctctatcatagatgtcgctataaacctattcagcacaatatattgttttcattttaatattgtacatataagtagtagggtacaatcagtaaattgaacggagaatattattcataaaaatacgatagtaacgggtgatatattcattagaatgaaccgaaaccggcggtaaggatctgagctacacatgctcaggttttttacaacgtgcacaacagaattgaaagcaaatatcatgcgatcataggcgtctcgcatatctcattaaagcagggggtgggcgaagaactccagcatgagatccccgcgctggaggatcatccagccggcgtcccggaaaacgattccgaagcccaacctttcatagaaggcggcggtggaatcgaaatctcgtgatggcaggttgggcgtcgcttggtcggtcatttcgaaccccagagtcccgctcagaagaactcgtcaagaaggcgatagaaggcgatgcgctgcgaatcgggagcggcgataccgtaaagcacgaggaagcggtcagcccattcgccgccaagctcttcagcaatatcacgggtagccaacgctatgtcctgatagcggtccgccacacccagccggccacagtcgatgaatccagaaaagcggccattttccaccatgatattcggcaagcaggcatcgccatgggtcacgacgagatcctcgccgtcgggcatgccccccaattcactggccgtcgttttacaacgtcgtgactgggaaaaccctggcgttacccaacttaatcgccttgcagcacatccccctttcgccagctggcgtaatagcgaagaggcccgcaccgatcgcccttcccaacagttgcgcagcctgaatggcgaatggcgcctgatgcggtattttctccttacgcatctgtgcggtatttcacaccgcatatggtgcactctcagtacaatctgctctgatgccgcatagttaagccagccccgacacccgccaacacccgctgacgcgccctgacgggcttgtctgctcccggcatccgcttacagacaagctgtgaccgtctccgggagctgcatgtgtcagaggttttcaccgtcatcaccgaaacgcgcgagacgaaagggcctcgtgatacgcctatttttataggttaatgtcatgataataatggtttcttagacgtcaggtggcacttttcggggaaatgtgcgcggaacccctatttgtttatttttctaaatacattcaaatatgtatccgctcatgagacaataaccctgataaatgcttcaataatattgaaaaaggaagagtatgagtattcaacatttccgtgtcgcccttattcccttttttgcggcattttgccttcctgtttttgctcacccagaaacgctggtgaaagtaaaagatgctgaagatcagttgggtgcacgagtgggttacatcgaactggatctcaacagcggtaagatccttgagagttttcgccccgaagaacgttttccaatgatgagcacttttaaagttctgctatgtggcgcggtattatcccgtattgacgccgggcaagagcaactcggtcgccgcatacactattctcagaatgacttggttgagtactcaccagtcacagaaaagcatcttacggatggcatgacagtaagagaattatgcagtgctgccataaccatgagtgataacactgcggccaacttacttctgacaacgatcggaggaccgaaggagctaaccgcttttttgcacaacatgggggatcatgtaactcgccttgatcgttgggaaccggagctgaatgaagccataccaaacgacgagcgtgacaccacgatgcctgtagcaatggcaacaacgttgcgcaaactattaactggcgaactacttactctagcttcccggcaacaattaatagactggatggaggcggataaagttgcaggaccacttctgcgctcggcccttccggctggctggtttattgctgataaatctggagccggtgagcgtgggtctcgcggtatcattgcagcactggggccagatggtaagccctcccgtatcgtagttatctacacgacggggagtcaggcaactatggatgaacgaaatagacagatcgctgagataggtgcctcactgattaagcattggtaactgtcagaccaagtttactcatatatactttagattgatttaaaacttcatttttaatttaaaaggatctaggtgaagatcctttttgataatctcatgaccaaaatcccttaacgtgagttttcgttccactgagcgtcagaccccgtagaaaagatcaaaggatcttcttgagatcctttttttctgcgcgtaatctgctgcttgcaaacaaaaaaaccaccgctaccagcggtggtttgtttgccggatcaagagctaccaactctttttccgaaggtaactggcttcagcagagcgcagataccaaatactgtccttctagtgtagccgtagttaggccaccacttcaagaactctgtagcaccgcctacatacctcgctctgctaatcctgttaccagtggctgctgccagtggcgataagtcgtgtcttaccgggttggactcaagacgatagttaccggataaggcgcagcggtcgggctgaacggggggttcgtgcacacagcccagcttggagcgaacgacctacaccgaactgagatacctacagcgtgagcattgagaaagcgccacgcttcccgaagggagaaaggcggacaggtatccggtaagcggcagggtcggaacaggagagcgcacgagggagcttccagggggaaacgcctggtatctttatagtcctgtcgggtttcgccacctctgacttgagcgtcgatttttgtgatgctcgtcaggggggcggagcctatggaaaaacgccagcaacgcggcctttttacggttcctggccttttgctggccttttgctcacatgttctttcctgcgttatcccctgattctgtggataaccgtattaccgcctttgagtgagctgataccgctcgccgcagccgaacgaccgagcgcagcgagtcagtgagcgaggaagcggaagagcgcccaatacgcaaaccgcctctccccgcgcgttggccgattcattaatgcagctggcacgacaggtttcccgactggaaagcgggcagtgagcgcaacgcaattaatgtgagttagctcactcattaggcaccccaggctttacactttatgcttccggctcgtatgttgtgtggaattgtgagcggataacaatttcacacaggaaacagctatgaccatgattacgccaagctttctagggggggggtaccgatctgagatcggtaacgaaaacgaacgggtagggatgaaaacggtcggtaacggtcggtaaaatacctctaccgttttcattttcatatttaacttgcgggacggaaacgaaaacgggatataccggtaacgaaaacgaacgggataaatacggtaatcgaaaaccgatacgatccggtcgggttaaagtcgaaatcggacgggaaccggtatttttgttcggtaaaatcacacatgaaaacatatattcaaaacttaaaaacaaatataaaaaattgtaaacacaagtcttaatgatcactagtggcgcgcctaggagatctcgagtagggataacagggtaatacatagataaaatccatataaatctggagcacacatagtttaatgtagcacataagtgataagtcttgggctcttggctaacataagaagccatataagtctactagcacacatgacacaatataaagtttaaaacacatattcataatcacttgctcacatctggatcacttagcatgctacagctagtgcaatattagacactttccaatatttctcaaacttttcactcattgcaacggccattctcctaatgacaaatttttcatgaacacaccattggtcaatcaaatcctttatctcacagaaacctttgtaaaataaatttgcagtggaatattgagtaccagataggagttcagtgagatcaaaaaacttcttcaaacacttaaaaagagttaatgccatcttccactcctcggctttaggacaaattgcatcgtacctacaataattgacatttgattaattgagaatttataatgatgacatgtacaacaattgagacaaacatacctgcgaggatcacttgttttaagccgtgttagtgcaggcttataatataaggcatccctcaacatcaaataggttgaattccatctagttgagacatcatatgagatccctttagatttatccaagtcacattcactagcacacttcattagttcttcccactgcaaaggagaagattttacagcaagaacaatcgctttgattttctcaattgttcctgcaattacagccaagccatcctttgcaaccaagttcagtatgtgacaagcacacctcacatgaaagaaagcaccatcacaaactagatttgaatcagtgtcctgcaaatcctcaattatatcgtgcacagctacttcatttgcactagcattatccaaagacaaggcaaacaattttttctcaatgttccacttaaccatgattgcagtgaaggtttgtgataacctttggccagtgtggcgcccttcaacatgaaaaaagccaacaattcttttttggagacaccaatcatcatcaatccaatggatggtgacacacatgtatgacttattttgacaagatgtccacatatccatagttgtactgaagcgagactgaacatcttttagttttccatacaacttttctttttcttccaaatacaaatccatgatatattttctagcagtgacacgggactttattggaaagtgagggcgcagagacttaacaaactcaacaaagtactcatgttctacaatattgaaaggatattcatgcatgattattgccaaatgaagcttctttaggctaaccacttcatcgtacttataaggctcaatgagatttatgtctttgccatgatccttttcactttttagacacaactgacctttaactaaactatgtgatgttctcaagtgatttcgaaatccgcttgttccatgatgaccctcagccctatacttagccttgcaattaggaaagttgcaatgtccccatacctgaacgtatttctttccatcgacctccacttcaatttccttcttggtgaaatgctgccatacatccgatgtgcacttctttgccctcttctgtggtgcttcttcttcgggttcaggttgtggctgtggttgtggttctggttgtggttgtggttgtggttgtggttcatgaacaatagccatatcatcttgactcggatctgtagctgtaccatttgcattactactgcttacactctgaataaaatgcctctcggcctcagctgttgatgatgatggtgatgtgcggccacatccatgcccacgcgcacgtgcacgtacattctgaatccgactagaagaggcttcagcttttcttttcaaccctgttataaacagatttttcgtattattctacagtcaatatgatgcttcccaatctacaaccaattagtaatgctaatgctattgctactgtttttctaatatataccttgagcatatgcagagaatacggaatttgttttgcgagtagaaggcgctcttgtggtagacatcaacttggccaatcttatggctgagcctgagggaggattatttccaaccggaggcgtcatctgaggaatggagtcgtagccggctagccgaagtggagagcagagccctggacagcaggtgttcagcaatcagcttggtgctgtactgctgtgacttgtgagcacctggacggctggacagcaatcagcaggtgttgcagagcccctggacagcacacaaatgacacaacagcttggtgcaatggtgctgacgtgctgtactgctaagtgctgtgagcctgtgagcagccgtggagacagggagaccgcggatggccggatgggcgagcgccgagcagtggaggtctggaggaccgctgaccgcagatggcggatggcggatgggcggaccgcggatgggcgagcagtggagtggaggtctgggcggatgggcggaccgcggcgcggatgggcgagtcgcgagcagtggagtggagggcggaccgtggatggcggcgtctgcgtccggcgtgccgcgtcacggccgtcaccgcgtgtggtgcctggtgcagcccagcggccggccggctgggagacagggagagtcggagagagcaggcgagagcgagacgcgtcgccggcgtcggcgtgcggctggcggcgtccggactccggcgtgggcgcgtggcggcgtgtgaatgtgtgatgctgttactcgtgtggtgcctggccgcctgggagagaggcagagcagcgttcgctaggtatttcttacatgggctgggcctcagtggttatggatgggagttggagctggccatattgcagtcatcccgaattagaaaatacggtaacgaaacgggatcatcccgattaaaaacgggatcccggtgaaacggtcgggaaactagctctaccgtttccgtttccgtttaccgttttgtatatcccgtttccgttccgttttcgttttttacctcgggttcgaaatcgatcgggataaaactaacaaaatcggttatacgataacggtcggtacgggattttcccatcctactttcatccctgagattattgtcgtttctttcgcagatcggtaccccccccctagagtcgacatcgatctagtaacatagatgacaccgcgcgcgataatttatcctagtttgcgcgctatattttgttttctatcgcgtattaaatgtataattgcgggactctaatcataaaaacccatctcataaataacgtcatgcattacatgttaattattacatgcttaacgtaattcaacagaaattatatgataatcatcgcaagaccggcaacaggattcaatcttaagaaactttattgccaaatgtttgaacgatctgcttcgacgcactccttctttaggtacggactagatctcggtgacgggcaggaccggacggggcggtaccggcaggctgaagtccagctgccagaaacccacgtcatgccagttcccgtgcttgaagccggccgcccgcagcatgccgcggggggcatatccgagcgcctcgtgcatgcgcacgctcgggtcgttgggcagcccgatgacagcgaccacgctcttgaagccctgtgcctccagggacttcagcaggtgggtgtagagcgtggagcccagtcccgtccgctggtggcggggggagacgtacacggtcgactcggccgtccagtcgtaggcgttgcgtgccttccaggggcccgcgtaggcgatgccggcgacctcgccgtccacctcggcgacgagccagggatagcgctcccgcagacggacgaggtcgtccgtccactcctgcggttcctgcggctcggtacggaagttgaccgtgcttgtctcgatgtagtggttgacgatggtgcagaccgccggcatgtccgcctcggtggcacggcggatgtcggccgggcgtcgttctgggctcatggatctggattgagagtgaatatgagactctaattggataccgaggggaatttatggaacgtcagtggagcatttttgacaagaaatatttgctagctgatagtgaccttaggcgacttttgaacgcgcaataatggtttctgacgtatgtgcttagctcattaaactccagaaacccgcggctgagtggctccttcaatcgttgcggttctgtcagttccaaacgtaaaacggcttgtcccgcgtcatcggcgggggtcataacgtgactcccttaattctccgctcatgatccccgggtaccgagctcgaattgcggctgagtggctccttcaatcgttgcggttctgtcagttccaaacgtaaaacggcttgtcccgcgtcatcggcgggggtcataacgtgactcccttaattctccgctcatgatcttgatcccctgcgccatcagatccttggcggcaagaaagccatccagtttactttgcagggcttcccaaccttaccagagggcgccccagctggcaattccggttcgcttgctgtatcgatatggtggatttatcacaaatgggacccgccgccgacagaggtgtgatgttaggccaggactttgaaaatttgcgcaactatcgtatagtggccgacaaattgacgccgagttgacagactgcctagcatttgagtgaattatgtgaggtaatgggctacactgaattggtagctcaaactgtcagtatttatgtatatgagtgtatattttcgcataatctcagaccaatctgaagatgaaatgggtatctgggaatggcgaaatcaaggcatcgatcgtgaagtttctcatctaagcccccatttggacgtgaatgtagacacgtcgaaataaagatttccgaattagaataatttgtttattgctttcgcctataaatacgacggatcgtaatttgtcgttttatcaaaatgtactttcattttataataacgctgcggacatctacatttttgaattgaaaaaaaattggtaattactctttctttttctccatattgaccatcatactcattgctgatccatgtagatttcccggacatgaagccatttacaattgaatatatcctgccgccgctgccgctttgcacccggtggagcttgcatgttggtttctacgcagaactgagccggttaggcagataatttccattgagaactgagccatgtgcaccttccccccaacacggtgagcgacggggcaacggagtgatccacatgggacttttaaacatcatccgtcggatggcgttgcgagagaagcagtcgatccgtgagatcagccgacgcaccgggcaggcgcgcaacacgatcgcaaagtatttgaacgcaggtacaatcgagccgacgttcaccgtcaccctggatgctgtaggcataggcttggttatgccggtactgccgggcctcttgcgggatatcgtccattccgacagcatcgccagtcactatggcgtgctgctagcgctatatgcgttgatgcaatttctatgcgcacccgttctcggagcactgtccgaccgctttggccgccgcccagtcctgctcgcttcgctacttggagccactatcgactacgcgatcatggcgaccacacccgtcctgtggtccaacccctccgctgctatagtgcagtcggcttctgacgttcagtgcagccgtcttctgaaaacgacatgtcgcacaagtcctaagttacgcgacaggctgccgccctgcccttttcctggcgttttcttgtcgcgtgttttagtcgcataaagtagaatacttgcgactagaaccggagacattacgccatgaacaagagcgccgccgctggcctgctgggctatgcccgcgtcagcaccgacgaccaggacttgaccaaccaacgggccgaactgcacgcggccggctgcaccaagctgttttccgagaagatcaccggcaccaggcgcgaccgcccggagctggccaggatgcttgaccacctacgccctggcgacgttgtgacagtgaccaggctagaccgcctggcccgcagcacccgcgacctactggacattgccgagcgcatccaggaggccggcgcgggcctgcgtagcctggcagagccgtgggccgacaccaccacgccggccggccgcatggtgttgaccgtgttcgccggcattgccgagttcgagcgttccctaatcatcgaccgcacccggagcgggcgcgaggccgccaaggcccgaggcgtgaagtttggcccccgccctaccctcaccccggcacagatcgcgcacgcccgcgagctgatcgaccaggaaggccgcaccgtgaaagaggcggctgcactgcttggcgtgcatcgctcgaccctgtaccgcgcacttgagcgcagcgaggaagtgacgcccaccgaggccaggcggcgcggtgccttccgtgaggacgcattgaccgaggccgacgccctggcggccgccgagaatgaacgccaagaggaacaagcatgaaaccgcaccaggacggccaggacgaaccgtttttcattaccgaagagatcgaggcggagatgatcgcggccgggtacgtgttcgagccgcccgcgcacgtctcaaccgtgcggctgcatgaaatcctggccggtttgtctgatgccaagctggcggcctggccggccagcttggccgctgaagaaaccgagcgccgccgtctaaaaaggtgatgtgtatttgagtaaaacagcttgcgtcatgcggtcgctgcgtatatgatgcgatgagtaaataaacaaatacgcaagggaacgcatgaagttatcgctgtacttaaccagaaaggcgggtcaggcaagacgaccatcgcaacccatctagcccgcgccctgcaactcgccggggccgatgttctgttagtcgattccgatccccagggcagtgcccgcgattgggcggccgtgcgggaagatcaaccgctaaccgttgtcggcatcgaccgcccgacgattgaccgcgacgtgaaggccatcggccggcgcgacttcgtagtgatcgacggagcgccccaggcggcggacttggctgtgtccgcgatcaaggcagccgacttcgtgctgattccggtgcagccaagcccttacgacatatgggccaccgccgacctggtggagctggttaagcagcgcattgaggtcacggatggaaggctacaagcggcctttgtcgtgtcgcgggcgatcaaaggcacgcgcatcggcggtgaggttgccgaggcgctggccgggtacgagctgcccattcttgagtcccgtatcacgcagcgcgtgagctacccaggcactgccgccgccggcacaaccgttcttgaatcagaacccgagggcgacgctgcccgcgaggtccaggcgctggccgctgaaattaaatcaaaactcatttgagttaatgaggtaaagagaaaatgagcaaaagcacaaacacgctaagtgccggccgtccgagcgcacgcagcagcaaggctgcaacgttggccagcctggcagacacgccagccatgaagcgggtcaactttcagttgccggcggaggatcacaccaagctgaagatgtacgcggtacgccaaggcaagaccattaccgagctgctatctgaatacatcgcgcagctaccagagtaaatgagcaaatgaataaatgagtagatgaattttagcggctaaaggaggcggcatggaaaatcaagaacaaccaggcaccgacgccgtggaatgccccatgtgtggaggaacgggcggttggccaggcgtaagcggctgggttgtctgccggccctgcaatggcactggaacccccaagcccgaggaatcggcgtgagcggtcgcaaaccatccggcccggtacaaatcggcgcggcgctgggtgatgacctggtggagaagttgaaggccgcgcaggccgcccagcggcaacgcatcgaggcagaagcacgccccggtgaatcgtggcaagcggccgctgatcgaatccgcaaagaatcccggcaaccgccggcagccggtgcgccgtcgattaggaagccgcccaagggcgacgagcaaccagattttttcgttccgatgctctatgacgtgggcacccgcgatagtcgcagcatcatggacgtggccgttttccgtctgtcgaagcgtgaccgacgagctggcgaggtgatccgctacgagcttccagacgggcacgtagaggtttccgcagggccggccggcatggccagtgtgtgggattacgacctggtactgatggcggtttcccatctaaccgaatccatgaaccgataccgggaagggaagggagacaagcccggccgcgtgttccgtccacacgttgcggacgtactcaagttctgccggcgagccgatggcggaaagcagaaagacgacctggtagaaacctgcattcggttaaacaccacgcacgttgccatgcagcgtacgaagaaggccaagaacggccgcctggtgacggtatccgagggtgaagccttgattagccgctacaagatcgtaaagagcgaaaccgggcggccggagtacatcgagatcgagctagctgattggatgtaccgcgagatcacagaaggcaagaacccggacgtgctgacggttcaccccgattactttttgatcgatcccggcatcggccgttttctctaccgcctggcacgccgcgccgcaggcaaggcagaagccagatggttgttcaagacgatctacgaacgcagtggcagcgccggagagttcaagaagttctgtttcaccgtgcgcaagctgatcgggtcaaatgacctgccggagtacgatttgaaggaggaggcggggcaggctggcccgatcctagtcatgcgctaccgcaacctgatcgagggcgaagcatccgccggttcctaatgtacggagcagatgctagggcaaattgccctagcaggggaaaaaggtcgaaaaggtctctttcctgtggatagcacgtacattgggaacccaaagccgtacattgggaaccggaacccgtacattgggaacccaaagccgtacattgggaaccggtcacacatgtaagtgactgatataaaagagaaaaaaggcgatttttccgcctaaaactctttaaaacttattaaaactcttaaaacccgcctggcctgtgcataactgtctggccagcgcacagccgaagagctgcaaaaagcgcctacccttcggtcgctgcgctccctacgccccgccgcttcgcgtcggcctatcgcggccgctggccgctcaaaaatggctggcctacggccaggcaatctaccagggcgcggacaagccgcgccgtcgccactcgaccgccggcgcccacatcaaggcaccctgcctcgcgcgtttcggtgatgacggtgaaaacctctgacacatgcagctcccggagacggtcacagcttgtctgtaagcggatgccgggagcagacaagcccgtcagggcgcgtcagcgggtgttggcgggtgtcggggcgcagccatgacccagtcacgtagcgatagcggagtgtatactggcttaactatgcggcatcagagcagattgtactgagagtgcaccatatgcggtgtgaaataccgcacagatgcgtaaggagaaaataccgcatcaggcgctcttccgcttcctcgctcactgactcgctgcgctcggtcgttcggctgcggcgagcggtatcagctcactcaaaggcggtaatacggttatccacagaatcaggggataacgcaggaaagaacatgtgagcaaaaggccagcaaaaggccaggaaccgtaaaaaggccgcgttgctggcgtttttccataggctccgcccccctgacgagcatcacaaaaatcgacgctcaagtcagaggtggcgaaacccgacaggactataaagataccaggcgtttccccctggaagctccctcgtgcgctctcctgttccgaccctgccgcttaccggatacctgtccgcctttctcccttcgggaagcgtggcgctttctcatagctcacgctgtaggtatctcagttcggtgtaggtcgttcgctccaagctgggctgtgtgcacgaaccccccgttcagcccgaccgctgcgccttatccggtaactatcgtcttgagtccaacccggtaagacacgacttatcgccactggcagcagccactggtaacaggattagcagagcgaggtatgtaggcggtgctacagagttcttgaagtggtggcctaactacggctacactagaaggacagtatttggtatctgcgctctgctgaagccagttaccttcggaaaaagagttggtagctcttgatccggcaaacaaaccaccgctggtagcggtggtttttttgtttgcaagcagcagattacgcgcagaaaaaaaggatctcaagaagatcctttgatcttttctacggggtctgacgctcagtggaacgaaaactcacgttaagggattttggtcatgagattatcaaaaaggatcttcacctagatccttttaaattaaaaatgaagttttaaatcaatctaaagtatatatgagtaaacttggtctgacagttaccaatgcttaatcagtgaggcacctatctcagcgatctgtctatttcgttcatccatagttgcctgactccccgtcgtgtagataactacgatacgggagggcttaccatctggccccagtgctgcaatgataccgcgagacccacgctcaccggctccagatttatcagcaataaaccagccagccggaagggccgagcgcagaagtggtcctgcaactttatccgcctccatccagtctattaattgttgccgggaagctagagtaagtagttcgccagttaatagtttgcgcaacgttgttgccattgctacaggcatcgtggtgtcacgctcgtcgtttggtatggcttcattcagctccggttcccaacgatcaaggcgagttacatgatcccccatgttgtgcaaaaaagcggttagctccttcggtcctccgatcgttgtcagaagtaagttggccgcagtgttatcactcatggttatggcagcactgcataattctcttactgtcatgccatccgtaagatgcttttctgtgactggtgagtactcaaccaagtcattctgagaatagtgtatgcggcgaccgagttgctcttgcccggcgtcaacacgggataataccgcgccacatagcagaactttaaaagtgctcatcattggaaaagacctgcaggggggggggggaaagccacgttgtgtctcaaaatctctgatgttacattgcacaagataaaaatatatcatcatgaacaataaaactgtctgcttacataaacagtaatacaaggggtgttatgagccatattcaacgggaaacgtcttgctcgaggccgcgattaaattccaacatggatgctgatttatatgggtataaatgggctcgcgataatgtcgggcaatcaggtgcgacaatctatcgattgtatgggaagcccgatgcgccagagttgtttctgaaacatggcaaaggtagcgttgccaatgatgttacagatgagatggtcagactaaactggctgacggaatttatgcctcttccgaccatcaagcattttatccgtactcctgatgatgcatggttactcaccactgcgatccccgggaaaacagcattccaggtattagaagaatatcctgattcaggtgaaaatattgttgatgcgctggcagtgttcctgcgccggttgcattcgattcctgtttgtaattgtccttttaacagcgatcgcgtatttcgtctcgctcaggcgcaatcacgaatgaataacggtttggttgatgcgagtgattttgatgacgagcgtaatggctggcctgttgaacaagtctggaaagaaatgcataagcttttgccattctcaccggattcagtcgtcactcatggtgatttctcacttgataaccttatttttgacgaggggaaattaataggttgtattgatgttggacgagtcggaatcgcagaccgataccaggatcttgccatcctatggaactgcctcggtgagttttctccttcattacagaaacggctttttcaaaaatatggtattgataatcctgatatgaataaattgcagtttcatttgatgctcgatgagtttttctaatcagaattggttaattggttgtaacactggcagagcattacgctgacttgacgggacggcggctttgttgaataaatcgaacttttgctgagttgaaggatcagatcacgcatcttcccgacaacgcagaccgttccgtggcaaagcaaaagttcaaaatcaccaactggtccacctacaacaaagctctcatcaaccgtggctccctcactttctggctggatgatggggcgattcaggcctggtatgagtcagcaacaccttcttcacgaggcagacctcagcgcccccccccccctgcaggtcaattcggtcgatatggctattacgaagaaggctcgtgcgcggagtcccgtgaactttcccacgcaacaagtgaaccgcaccgggtttgccggaggccatttcgttaaaatgcgcagc

SEQ ID NO: 2 - DNA, 4291 bp, artificial sequence
  vector
ctttcctgcgttatcccctgattctgtggataaccgtattaccgcctttgagtgagctgataccgctcgccgcagccgaacgaccgagcgcagcgagtcagtgagcgaggaagcggaagagcgcccaatacgcaaaccgcctctccccgcgcgttggccgattcattaatgcagctggcacgacaggtttcccgactggaaagcgggcagtgagcgcaacgcaattaatacgcgtaccgctagccaggaagagtttgtagaaacgcaaaaaggccatccgtcaggatggccttctgcttagtttgatgcctggcagtttatggcgggcgtcctgcccgccaccctccgggccgttgcttcacaacgttcaaatccgctcccggcggatttgtcctactcaggagagcgttcaccgacaaacaacagataaaacgaaaggcccagtcttccgactgagcctttcgttttatttgatgcctggcagttccctactctcgcgttaacgctagcatggatgttttcccagtcacgacgttgtaaaacgacggccagtcttaagctcgggccccaaataatgattttattttgactgatagtgacctgttcgttgcaacacattgatgagcaatgcttttttataatgccaactttgtacaaaaaagctgaacgagaaacgtaaaatgatataaatatcaatatattaaattagattttgcataaaaaacagactacataatactgtaaaacacaacatatccagtcactatgaatcaactacttagatggtattagtgacctgtagtcgaccgacagccttccaaatgttcttcgggtgatgctgccaacttagtcgaccgacagccttccaaatgttcttctcaaacggaatcgtcgtatccagcctactcgctattgtcctcaatgccgtattaaatcataaaaagaaataagaaaaagaggtgcgagcctcttttttgtgtgacaaaataaaaacatctacctattcatatacgctagtgtcatagtcctgaaaatcatctgcatcaagaacaatttcacaactcttatacttttctcttacaagtcgttcggcttcatctggattttcagcctctatacttactaaacgtgataaagtttctgtaatttctactgtatcgacctgcagactggctgtgtataagggagcctgacatttatattccccagaacatcaggttaatggcgtttttgatgtcattttcgcggtggctgagatcagccacttcttccccgataacggagaccggcacactggccatatcggtggtcatcatgcgccagctttcatccccgatatgcaccaccgggtaaagttcacgggagactttatctgacagcagacgtgcactggccagggggatcaccatccgtcgcccgggcgtgtcaataatatcactctgtacatccacaaacagacgataacggctctctcttttataggtgtaaaccttaaactgcatttcaccagcccctgttctcgtcagcaaaagagccgttcatttcaataaaccgggcgacctcagccatcccttcctgattttccgctttccagcgttcggcacgcagacgacgggcttcattctgcatggttgtgcttaccagaccggagatattgacatcatatatgccttgagcaactgatagctgtcgctgtcaactgtcactgtaatacgctgcttcatagcatacctctttttgacatacttcgggtatacatatcagtatatattcttataccgcaaaaatcagcgcgcaaatacgcatactgttatctggcttttagtaagccggatccacgcggcgtttacgccccgccctgccactcatcgcagtactgttgtaattcattaagcattctgccgacatggaagccatcacagacggcatgatgaacctgaatcgccagcggcatcagcaccttgtcgccttgcgtataatatttgcccatggtgaaaacgggggcgaagaagttgtccatattggccacgtttaaatcaaaactggtgaaactcacccagggattggctgagacgaaaaacatattctcaataaaccctttagggaaataggccaggttttcaccgtaacacgccacatcttgcgaatatatgtgtagaaactgccggaaatcgtcgtggtattcactccagagcgatgaaaacgtttcagtttgctcatggaaaacggtgtaacaagggtgaacactatcccatatcaccagctcaccgtctttcattgccatacggaattccggatgagcattcatcaggcgggcaagaatgtgaataaaggccggataaaacttgtgcttatttttctttacggtctttaaaaaggccgtaatatccagctgaacggtctggttataggtacattgagcaactgactgaaatgcctcaaaatgttctttacgatgccattgggatatatcaacggtggtatatccagtgatttttttctccattttagcttccttagctcctgaaaatctcgataactcaaaaaatacgcccggtagtgatcttatttcattatggtgaaagttggaacctcttacgtgccgatcaacgtctcattttcgccaaaagttggcccagggcttcccggtatcaacagggacaccaggatttatttattctgcgaagtgatcttccgtcacaggtatttattcggcgcaaagtgcgtcgggtgatgctgccaacttagtcgactacaggtcactaataccatctaagtagttgattcatagtgactggatatgttgtgttttacagtattatgtagtctgttttttatgcaaaatctaatttaatatattgatatttatatcattttacgtttctcgttcagctttcttgtacaaagttggcattataagaaagcattgcttatcaatttgttgcaacgaacaggtcactatcagtcaaaataaaatcattatttgccatccagctgatatcccctatagtgagtcgtattacatggtcatagctgtttcctggcagctctggcccgtgtctcaaaatctctgatgttacattgcacaagataaaataatatcatcatgatcagtcctgctcctcggccacgaagtgcacgcagttgccggccgggtcgcgcagggcgaactcccgcccccacggctgctcgccgatctcggtcatggccggcccggaggcgtcccggaagttcgtggacacgacctccgaccactcggcgtacagctcgtccaggccgcgcacccacacccaggccagggtgttgtccggcaccacctggtcctggaccgcgctgatgaacagggtcacgtcgtcccggaccacaccggcgaagtcgtcctccacgaagtcccgggagaacccgagccggtcggtccagaactcgaccgctccggcgacgtcgcgcgcggtgagcaccggaacggcactggtcaacttggccatggtttagttcctcaccttgtcgtattatactatgccgatatactatgccgatgattaattgtcaacacgtgctgatcatgaccaaaatcccttaacgtgagttacgcgtcgttccactgagcgtcagaccccgtagaaaagatcaaaggatcttcttgagatcctttttttctgcgcgtaatctgctgcttgcaaacaaaaaaaccaccgctaccagcggtggtttgtttgccggatcaagagctaccaactctttttccgaaggtaactggcttcagcagagcgcagataccaaatactgttcttctagtgtagccgtagttaggccaccacttcaagaactctgtagcaccgcctacatacctcgctctgctaatcctgttaccagtggctgctgccagtggcgataagtcgtgtcttaccgggttggactcaagacgatagttaccggataaggcgcagcggtcgggctgaacggggggttcgtgcacacagcccagcttggagcgaacgacctacaccgaactgagatacctacagcgtgagctatgagaaagcgccacgcttcccgaagggagaaaggcggacaggtatccggtaagcggcagggtcggaacaggagagcgcacgagggagcttccagggggaaacgcctggtatctttatagtcctgtcgggtttcgccacctctgacttgagcgtcgatttttgtgatgctcgtcaggggggcggagcctatggaaaaacgccagcaacgcggcctttttacggttcctggccttttgctggccttttgctcacatgtt

SEQ ID NO: 3 - DNA, 4762 bp, artificial sequence
  vector
ctttcctgcgttatcccctgattctgtggataaccgtattaccgcctttgagtgagctgataccgctcgccgcagccgaacgaccgagcgcagcgagtcagtgagcgaggaagcggaagagcgcccaatacgcaaaccgcctctccccgcgcgttggccgattcattaatgcagctggcacgacaggtttcccgactggaaagcgggcagtgagcgcaacgcaattaatacgcgtaccgctagccaggaagagtttgtagaaacgcaaaaaggccatccgtcaggatggccttctgcttagtttgatgcctggcagtttatggcgggcgtcctgcccgccaccctccgggccgttgcttcacaacgttcaaatccgctcccggcggatttgtcctactcaggagagcgttcaccgacaaacaacagataaaacgaaaggcccagtcttccgactgagcctttcgttttatttgatgcctggcagttccctactctcgcgttaacgctagcatggatgttttcccagtcacgacgttgtaaaacgacggccagtcttaagctcgggccccaaataatgattttattttgactgatagtgacctgttcgttgcaacacattgatgagcaatgcttttttataatgccaactttgtacaaaaaagctgaacgagaaacgtaaaatgatataaatatcaatatattaaattagattttgcataaaaaacagactacataatactgtaaaacacaacatatccagtcactatgaatcaactacttagatggtattagtgacctgtagtcgaccgacagccttccaaatgttcttcgggtgatgctgccaacttagtcgaccgacagccttccaaatgttcttctcaaacggaatcgtcgtatccagcctactcgctattgtcctcaatgccgtattaaatcataaaaagaaataagaaaaagaggtgcgagcctcttttttgtgtgacaaaataaaaacatctacctattcatatacgctagtgtcatagtcctgaaaatcatctgcatcaagaacaatttcacaactcttatacttttctcttacaagtcgttcggcttcatctggattttcagcctctatacttactaaacgtgataaagtttctgtaatttctactgtatcgacctgcagactggctgtgtataagggagcctgacatttatattccccagaacatcaggttaatggcgtttttgatgtcattttcgcggtggctgagatcagccacttcttccccgataacggagaccggcacactggccatatcggtggtcatcatgcgccagctttcatccccgatatgcaccaccgggtaaagttcacgggagactttatctgacagcagacgtgcactggccagggggatcaccatccgtcgcccgggcgtgtcaataatatcactctgtacatccacaaacagacgataacggctctctcttttataggtgtaaaccttaaactgcatttcaccagcccctgttctcgtcagcaaaagagccgttcatttcaataaaccgggcgacctcagccatcccttcctgattttccgctttccagcgttcggcacgcagacgacgggcttcattctgcatggttgtgcttaccagaccggagatattgacatcatatatgccttgagcaactgatagctgtcgctgtcaactgtcactgtaatacgctgcttcatagcatacctctttttgacatacttcgggtatacatatcagtatatattcttataccgcaaaaatcagcgcgcaaatacgcatactgttatctggcttttagtaagccggatccacgcggcgtttacgccccgccctgccactcatcgcagtactgttgtaattcattaagcattctgccgacatggaagccatcacagacggcatgatgaacctgaatcgccagcggcatcagcaccttgtcgccttgcgtataatatttgcccatggtgaaaacgggggcgaagaagttgtccatattggccacgtttaaatcaaaactggtgaaactcacccagggattggctgagacgaaaaacatattctcaataaaccctttagggaaataggccaggttttcaccgtaacacgccacatcttgcgaatatatgtgtagaaactgccggaaatcgtcgtggtattcactccagagcgatgaaaacgtttcagtttgctcatggaaaacggtgtaacaagggtgaacactatcccatatcaccagctcaccgtctttcattgccatacggaattccggatgagcattcatcaggcgggcaagaatgtgaataaaggccggataaaacttgtgcttatttttctttacggtctttaaaaaggccgtaatatccagctgaacggtctggttataggtacattgagcaactgactgaaatgcctcaaaatgttctttacgatgccattgggatatatcaacggtggtatatccagtgatttttttctccattttagcttccttagctcctgaaaatctcgataactcaaaaaatacgcccggtagtgatcttatttcattatggtgaaagttggaacctcttacgtgccgatcaacgtctcattttcgccaaaagttggcccagggcttcccggtatcaacagggacaccaggatttatttattctgcgaagtgatcttccgtcacaggtatttattcggcgcaaagtgcgtcgggtgatgctgccaacttagtcgactacaggtcactaataccatctaagtagttgattcatagtgactggatatgttgtgttttacagtattatgtagtctgttttttatgcaaaatctaatttaatatattgatatttatatcattttacgtttctcgttcagctttcttgtacaaagttggcattataagaaagcattgcttatcaatttgttgcaacgaacaggtcactatcagtcaaaataaaatcattatttgccatccagctgatatcccctatagtgagtcgtattacatggtcatagctgtttcctggcagctctggcccgtgtctcaaaatctctgatgttacattgcacaagataaaataatatcatcatgaacaataaaactgtctgcttacataaacagtaatacaaggggtgttatgagccatattcaacgggaaacgtcgaggccgcgattaaattccaacatggatgctgatttatatgggtataaatgggctcgcgataatgtcgggcaatcaggtgcgacaatctatcgcttgtatgggaagcccgatgcgccagagttgtttctgaaacatggcaaaggtagcgttgccaatgatgttacagatgagatggtcagactaaactggctgacggaatttatgcctcttccgaccatcaagcattttatccgtactcctgatgatgcatggttactcaccactgcgatccccggaaaaacagcattccaggtattagaagaatatcctgattcaggtgaaaatattgttgatgcgctggcagtgttcctgcgccggttgcattcgattcctgtttgtaattgtccttttaacagcgatcgcgtatttcgtctcgctcaggcgcaatcacgaatgaataacggtttggttgatgcgagtgattttgatgacgagcgtaatggctggcctgttgaacaagtctggaaagaaatgcataaacttttgccattctcaccggattcagtcgtcactcatggtgatttctcacttgataaccttatttttgacgaggggaaattaataggttgtattgatgttggacgagtcggaatcgcagaccgataccaggatcttgccatcctatggaactgcctcggtgagttttctccttcattacagaaacggctttttcaaaaatatggtattgataatcctgatatgaataaattgcagtttcatttgatgctcgatgagtttttctaatcagaattggttaattggttgtaacactggcagagcattacgctgacttgacgggacggcgcaagctcatgaccaaaatcccttaacgtgagttacgcgtcgttccactgagcgtcagaccccgtagaaaagatcaaaggatcttcttgagatcctttttttctgcgcgtaatctgctgcttgcaaacaaaaaaaccaccgctaccagcggtggtttgtttgccggatcaagagctaccaactctttttccgaaggtaactggcttcagcagagcgcagataccaaatactgttcttctagtgtagccgtagttaggccaccacttcaagaactctgtagcaccgcctacatacctcgctctgctaatcctgttaccagtggctgctgccagtggcgataagtcgtgtcttaccgggttggactcaagacgatagttaccggataaggcgcagcggtcgggctgaacggggggttcgtgcacacagcccagcttggagcgaacgacctacaccgaactgagatacctacagcgtgagctatgagaaagcgccacgcttcccgaagggagaaaggcggacaggtatccggtaagcggcagggtcggaacaggagagcgcacgagggagcttccagggggaaacgcctggtatctttatagtcctgtcgggtttcgccacctctgacttgagcgtcgatttttgtgatgctcgtcaggggggcggagcctatggaaaaacgccagcaacgcggcctttttacggttcctggccttttgctggccttttgctcacatgtt

SEQ ID NO: 4 - DNA, 16843 bp, artificial sequence
  vector
ccgggctggttgccctcgccgctgggctggcggccgtctatggccctgcaaacgcgccagaaacgccgtcgaagccgtgtgcgagacaccgcggccgccggcgttgtggatacctcgcggaaaacttggccctcactgacagatgaggggcggacgttgacacttgaggggccgactcacccggcgcggcgttgacagatgaggggcaggctcgatttcggccggcgacgtggagctggccagcctcgcaaatcggcgaaaacgcctgattttacgcgagtttcccacagatgatgtggacaagcctggggataagtgccctgcggtattgacacttgaggggcgcgactactgacagatgaggggcgcgatccttgacacttgaggggcagagtgctgacagatgaggggcgcacctattgacatttgaggggctgtccacaggcagaaaatccagcatttgcaagggtttccgcccgtttttcggccaccgctaacctgtcttttaacctgcttttaaaccaatatttataaaccttgtttttaaccagggctgcgccctgtgcgcgtgaccgcgcacgccgaaggggggtgcccccccttctcgaaccctcccggcccgctaacgcgggcctcccatccccccaggggctgcgcccctcggccgcgaacggcctcaccccaaaaatggcagcgctggcagtccttgccattgccgggatcggggcagtaacgggatgggcgatcagcccgagcgcgacgcccggaagcattgacgtgccgcaggtgctggcatcgacattcagcgaccaggtgccgggcagtgagggcggcggcctgggtggcggcctgcccttcacttcggccgtcggggcattcacggacttcatggcggggccggcaatttttaccttgggcattcttggcatagtggtcgcgggtgccgtgctcgtgttcgggggtgcgataaacccagcgaaccatttgaggtgataggtaagattataccgaggtatgaaaacgagaattggacctttacagaattactctatgaagcgccatatttaaaaagctaccaagacgaagaggatgaagaggatgaggaggcagattgccttgaatatattgacaatactgataagataatatatcttttatatagaagatatcgccgtatgtaaggatttcagggggcaaggcataggcagcgcgcttatcaatatatctatagaatgggcaaagcataaaaacttgcatggactaatgcttgaaacccaggacaataaccttatagcttgtaaattctatcataattgggtaatgactccaacttattgatagtgttttatgttcagataatgcccgatgactttgtcatgcagctccaccgattttgagaacgacagcgacttccgtcccagccgtgccaggtgctgcctcagattcaggttatgccgctcaattcgctgcgtatatcgcttgctgattacgtgcagctttcccttcaggcgggattcatacagcggccagccatccgtcatccatatcaccacgtcaaagggtgacagcaggctcataagacgccccagcgtcgccatagtgcgttcaccgaatacgtgcgcaacaaccgtcttccggagactgtcatacgcgtaaaacagccagcgctggcgcgatttagccccgacatagccccactgttcgtccatttccgcgcagacgatgacgtcactgcccggctgtatgcgcgaggttaccgactgcggcctgagttttttaagtgacgtaaaatcgtgttgaggccaacgcccataatgcgggctgttgcccggcatccaacgccattcatggccatatcaatgattttctggtgcgtaccgggttgagaagcggtgtaagtgaactgcagttgccatgttttacggcagtgagagcagagatagcgctgatgtccggcggtgcttttgccgttacgcaccaccccgtcagtagctgaacaggagggacagctgatagacacagaagccactggagcacctcaaaaacaccatcatacactaaatcagtaagttggcagcatcacccataattgtggtttcaaaatcggctccgtcgatactatgttatacgccaactttgaaaacaactttgaaaaagctgttttctggtatttaaggttttagaatgcaaggaacagtgaattggagttcgtcttgttataattagcttcttggggtatctttaaatactgtagaaaagaggaaggaaataataaatggctaaaatgagaatatcaccggaattgaaaaaactgatcgaaaaataccgctgcgtaaaagatacggaaggaatgtctcctgctaaggtatataagctggtgggagaaaatgaaaacctatatttaaaaatgacggacagccggtataaagggaccacctatgatgtggaacgggaaaaggacatgatgctatggctggaaggaaagctgcctgttccaaaggtcctgcactttgaacggcatgatggctggagcaatctgctcatgagtgaggccgatggcgtcctttgctcggaagagtatgaagatgaacaaagccctgaaaagattatcgagctgtatgcggagtgcatcaggctctttcactccatcgacatatcggattgtccctatacgaatagcttagacagccgcttagccgaattggattacttactgaataacgatctggccgatgtggattgcgaaaactgggaagaagacactccatttaaagatccgcgcgagctgtatgattttttaaagacggaaaagcccgaagaggaacttgtcttttcccacggcgacctgggagacagcaacatctttgtgaaagatggcaaagtaagtggctttattgatcttgggagaagcggcagggcggacaagtggtatgacattgccttctgcgtccggtcgatcagggaggatatcggggaagaacagtatgtcgagctattttttgacttactggggatcaagcctgattgggagaaaataaaatattatattttactggatgaattgttttagtacctagatgtggcgcaacgatgccggcgacaagcaggagcgcaccgacttcttccgcatcaagtgttttggctctcaggccgaggcccacggcaagtatttgggcaaggggtcgctggtattcgtgcagggcaagattcggaataccaagtacgagaaggacggccagacggtctacgggaccgacttcattgccgataaggtggattatctggacaccaaggcaccaggcgggtcaaatcaggaataagggcacattgccccggcgtgagtcggggcaatcccgcaaggagggtgaatgaatcggacgtttgaccggaaggcatacaggcaagaactgatcgacgcggggttttccgccgaggatgccgaaaccatcgcaagccgcaccgtcatgcgtgcgccccgcgaaaccttccagtccgtcggctcgatggtccagcaagctacggccaagatcgagcgcgacagcgtgcaactggctccccctgccctgcccgcgccatcggccgccgtggagcgttcgcgtcgtctcgaacaggaggcggcaggtttggcgaagtcgatgaccatcgacacgcgaggaactatgacgaccaagaagcgaaaaaccgccggcgaggacctggcaaaacaggtcagcgaggccaagcaggccgcgttgctgaaacacacgaagcagcagatcaaggaaatgcagctttccttgttcgatattgcgccgtggccggacacgatgcgagcgatgccaaacgacacggcccgctctgccctgttcaccacgcgcaacaagaaaatcccgcgcgaggcgctgcaaaacaaggtcattttccacgtcaacaaggacgtgaagatcacctacaccggcgtcgagctgcgggccgacgatgacgaactggtgtggcagcaggtgttggagtacgcgaagcgcacccctatcggcgagccgatcaccttcacgttctacgagctttgccaggacctgggctggtcgatcaatggccggtattacacgaaggccgaggaatgcctgtcgcgcctacaggcgacggcgatgggcttcacgtccgaccgcgttgggcacctggaatcggtgtcgctgctgcaccgcttccgcgtcctggaccgtggcaagaaaacgtcccgttgccaggtcctgatcgacgaggaaatcgtcgtgctgtttgctggcgaccactacacgaaattcatatgggagaagtaccgcaagctgtcgccgacggcccgacggatgttcgactatttcagctcgcaccgggagccgtacccgctcaagctggaaaccttccgcctcatgtgcggatcggattccacccgcgtgaagaagtggcgcgagcaggtcggcgaagcctgcgaagagttgcgaggcagcggcctggtggaacacgcctgggtcaatgatgacctggtgcattgcaaacgctagggccttgtggggtcagttccggctgggggttcagcagccagcgctttactggcatttcaggaacaagcgggcactgctcgacgcacttgcttcgctcagtatcgctcgggacgcacggcgcgctctacgaactgccgataaacagaggattaaaattgacaattgtgattaaggctcagattcgacggcttggagcggccgacgtgcaggatttccgcgagatccgattgtcggccctgaagaaagctccagagatgttcgggtccgtttacgagcacgaggagaaaaagcccatggaggcgttcgctgaacggttgcgagatgccgtggcattcggcgcctacatcgacggcgagatcattgggctgtcggtcttcaaacaggaggacggccccaaggacgctcacaaggcgcatctgtccggcgttttcgtggagcccgaacagcgaggccgaggggtcgccggtatgctgctgcgggcgttgccggcgggtttattgctcgtgatgatcgtccgacagattccaacgggaatctggtggatgcgcatcttcatcctcggcgcacttaatatttcgctattctggagcttgttgtttatttcggtctaccgcctgccgggcggggtcgcggcgacggtaggcgctgtgcagccgctgatggtcgtgttcatctctgccgctctgctaggtagcccgatacgattgatggcggtcctgggggctatttgcggaactgcgggcgtggcgctgttggtgttgacaccaaacgcagcgctagatcctgtcggcgtcgcagcgggcctggcgggggcggtttccatggcgttcggaaccgtgctgacccgcaagtggcaacctcccgtgcctctgctcacctttaccgcctggcaactggcggccggaggacttctgctcgttccagtagctttagtgtttgatccgccaatcccgatgcctacaggaaccaatgttctcggcctggcgtggctcggcctgatcggagcgggtttaacctacttcctttggttccgggggatctcgcgactcgaacctacagttgtttccttactgggctttctcagccccagatctggggtcgatcagccggggatgcatcaggccgacagtcggaacttcgggtccccgacctgtaccattcggtgagcaatggataggggagttgatatcgtcaacgttcacttctaaagaaatagcgccactcagcttcctcagcggctttatccagcgatttcctattatgtcggcatagttctcaagatcgacagcctgtcacggttaagcgagaaatgaataagaaggctgataattcggatctctgcgagggagatgatatttgatcacaggcagcaacgctctgtcatcgttacaatcaacatgctaccctccgcgagatcatccgtgtttcaaacccggcagcttagttgccgttcttccgaatagcatcggtaacatgagcaaagtctgccgccttacaacggctctcccgctgacgccgtcccggactgatgggctgcctgtatcgagtggtgattttgtgccgagctgccggtcggggagctgttggctggctggtggcaggatatattgtggtgtaaacaaattgacgcttagacaacttaataacacattgcggacgtttttaatgtactggggtggtttttcttttcaccagtgagacgggcaacagctgattgcccttcaccgcctggccctgagagagttgcagcaagcggtccacgctggtttgccccagcaggcgaaaatcctgtttgatggtggttccgaaatcggcaaaatcccttataaatcaaaagaatagcccgagatagggttgagtgttgttccagtttggaacaagagtccactattaaagaacgtggactccaacgtcaaagggcgaaaaaccgtctatcagggcgatggcccactacctgtatggccgcattcgcaaaacacacctagactagatttgttttgctaacccaattgatattaattatatatgattaatatttatatgtatatggatttggttaatgaaatgcatctggttcatcaaagaattataaagacacgtgacattcatttaggataagaaatatggatgatctctttctcttttattcagataactagtaattacacataacacacaactttgatgcccacattatagtgattagcatgtcactatgtgtgcatccttttatttcatacattaattaagttggccaatccagaagatggacaagtctaggttaaccatgtggtacctacgcgttcgaatatccatgggccgcttcaggccagggcgctggggaaggcgatggcgtgctcggtcagctgccacttctggttcttggcgtcgctccggtcctcccgcagcagcttgtgctggatgaagtgccactcgggcatcttgctgggcacgctcttggccttgtacacggtgtcgaactggcaccggtaccggccgccgtccttcagcagcaggtacatgctcacgtcgcccttcaggatgccctgcttaggcacgggcatgatcttctcgcagctggcctcccagttggtggtcatcttcttcatcacggggccgtcggcggggaagttcacgccgttgaagatgctcttgtggtagatgcagttctccttcacgctcacggtgatgtccacgttacagatgcacacggcgccgtcctcgaacaggaagctccggccccaggtgtagccggcggggcagctgttcttgaagtagtccacgatgtcctgggggtactcggtgaagatccggtcgccgtacttgaagccggcgctcaggatgtcctcgctgaagggcagggggccgccctcgatcacgcacaggttgatggtctgcttgcccttgaaggggtagccgatgccctcgccggtgatcacgaacttgtggccgttcacgcagccctccatgtggtacttcatggtcatctcctccttcaggccgtgcttgctgtgggccatggtggcgaccggtgaattcgagctcggtacccggggatcctgagtaaaacagaggagggtctcactaagtttatagagagactgagagagataaagggacacgtatgaagcgtctgttttcgtggtgtgacgtcaaagtcattttgctctctacgcgtgtctgtgtcggcttgatctttttttttgctttttggaactcatgtcggtagtatatcttttatttattttttctttttttcccttttctttcaaactgatgtcggtatgatatttattccatcctaaaatgtaacttactattattagtagtcggtccatgtctattggcccatcatgtggtcattttacgtttacgtcgtgtggctgtttattataacaaacggcacatccttctcattcgaattgtatttctccttaatcgttctaataggtatgatcttttattttatacgtaaaattaaaattgaatgatgtcaagaacgaaaattaatttgtatttacaaaggagctaaatattgtttattcctctactggtagaagataaaagaagtagatgaaataatgatcttactagagaatattcctcatttacactagtcaaatggaaatcttgtaaacttttacaataatttatcctgaaaatatgaaaaaatagaagaaaatgtttacctcctctctcctcttaattcacctacgatcggtgcgggcctcttcgctattacgccagctggcgaaagggggatgtgctgcaaggcgattaagttgggtaacgccagggttttcccagtcacgacgttgtaaaacgacggccagtgaattcgagctcggtacccggggatcctctagagtcgacctgcaggcatgcaagcttgttgaaacatccctgaagtgtctcattttattttatttattctttgctgataaaaaaataaaataaaagaagctaagcacacggtcaaccattgctctactgctaaaagggttatgtgtagtgttttactgcataaattatgcagcaaacaagacaactcaaattaaaaaatttcctttgcttgtttttttgttgtctctgacttgactttcttgtggaagttggttgtataaggattgggacacaccattgtccttcttaatttaattttatttctttgctgataaaaaaaaaaaatttcatatagtgttaaataataatttgttaaataaccaaaaagtcaaatatgtttactctcgtttaaataattgagagtcgtccagcaaggctaaacgattgtatagatttatgacaatatttacttttttatagataaatgttatattataataaatttatatacatatattatatgttatttattatttattattattttaaatccttcaatattttatcaaaccaactcataattttttttttatctgtaagaagcaataaaattaaatagacccactttaaggatgatccaacctttatacagagtaagagagttcaaatagtaccctttcatatacatatcaactaaaatattagaaatatcatggatcaaaccttataaagacattaaataagtggataagtataatatataaatgggtagtatataatatataaatggatacaaacttctctctttataattgttatgtctccttaacatcctaatataatacataagtgggtaatatataatatataaatggagacaaacttcttccattataattgttatgtcttcttaacacttatgtctcgttcacaatgctaaagttagaattgtttagaaagtcttatagtacacatttgtttttgtactatttgaagcattccataagccgtcacgattcagatgatttataataataagaggaaatttatcatagaacaataaggtgcatagatagagtgttaatatatcataacatcctttgtttattcatagaagaagtgagatggagctcagttattatactgttacatggtcggatacaatattccatgctctccatgagctcttacacctacatgcattttagttcatacttcatgcacgtggccatcacagctagctgcagctacatatttacattttacaacaccaggagaactgccctgttagtgcataacaatcagaagatggccgtggctactcgagttatcgaaccactttgtacaagaaagctgaacgagaaacgtaaaatgatataaatatcaatatattaaattagattttgcataaaaaacagactacataatactgtaaaacacaacatatccagtcactatggtcgacctgcagactggctgtgtataagggagcctgacatttatattccccagaacatcaggttaatggcgtttttgatgtcattttcgcggtggctgagatcagccacttcttccccgataacggagaccggcacactggccatatcggtggtcatcatgcgccagctttcatccccgatatgcaccaccgggtaaagttcacgggagactttatctgacagcagacgtgcactggccagggggatcaccatccgtcgcccgggcgtgtcaataatatcactctgtacatccacaaacagacgataacggctctctcttttataggtgtaaaccttaaactgcatttcaccagtccctgttctcgtcagcaaaagagccgttcatttcaataaaccgggcgacctcagccatcccttcctgattttccgctttccagcgttcggcacgcagacgacgggcttcattctgcatggttgtgcttaccagaccggagatattgacatcatatatgccttgagcaactgatagctgtcgctgtcaactgtcactgtaatacgctgcttcatagcacacctctttttgacatacttcgggtatacatatcagtatatattcttataccgcaaaaatcagcgcgcaaatacgcatactgttatctggcttttagtaagccggatcctctagattacgccccgccctgccactcatcgcagtactgttgtaattcattaagcattctgccgacatggaagccatcacagacggcatgatgaacctgaatcgccagcggcatcagcaccttgtcgccttgcgtataatatttgcccatggtgaaaacgggggcgaagaagttgtccatattggccacgtttaaatcaaaactggtgaaactcacccagggattggctgagacgaaaaacatattctcaataaaccctttagggaaataggccaggttttcaccgtaacacgccacatcttgcgaatatatgtgtagaaactgccggaaatcgtcgtggtattcactccagagcgatgaaaacgtttcagtttgctcatggaaaacggtgtaacaagggtgaacactatcccatatcaccagctcaccgtctttcattgccatacggaattccggatgagcattcatcaggcgggcaagaatgtgaataaaggccggataaaacttgtgcttatttttctttacggtctttaaaaaggccgtaatatccagctgaacggtctggttataggtacattgagcaactgactgaaatgcctcaaaatgttctttacgatgccattgggatatatcaacggtggtatatccagtgatttttttctccattttagcttccttagctcctgaaaatctcgccggatcctaactcaaaatccacacattatacgagccggaagcataaagtgtaaagcctggggtgcctaatgcggccgccatagtgactggatatgttgtgttttacagtattatgtagtctgttttttatgcaaaatctaatttaatatattgatatttatatcattttacgtttctcgttcagcttttttgtacaaacttgtttgataaccggtactagtgtgcacgtcgagcgtgtcctctccaaatgaaatgaacttccttatatagaggaagggtcttgcgaaggatagtgggattgtgcgtcatcccttacgtcagtggagatgtcacatcaatccacttgctttgaagacgtggttggaacgtcttctttttccacgatgctcctcgtgggtgggggtccatctttgggaccactgtcggcagaggcatcttgaatgatagcctttcctttatcgcaatgatggcatttgtaggagccaccttccttttctactgtcctttcgatgaagtgacagatagctgggcaatggaatccgaggaggtttcccgaaattatcctttgttgaaaagtctcaatagccctttggtcttctgagactgtatctttgacatttttggagtagaccagagtgtcgtgctccaccatgttgacgaagattttcttcttgtcattgagtcgtaaaagactctgtatgaactgttcgccagtcttcacggcgagttctgttagatcctcgatttgaatcttagactccatgcatggccttagattcagtaggaactacctttttagagactccaatctctattacttgccttggtttatgaagcaagccttgaatcgtccatactggaatagtacttctgatcttgagaaatatgtctttctctgtgttcttgatgcaattagtcctgaatcttttgactgcatctttaaccttcttgggaaggtatttgatctcctggagattgttactcgggtagatcgtcttgatgagacctgctgcgtaggcctctctaaccatctgtgggtcagcattctttctgaaattgaagaggctaaccttctcattatcagtggtgaacatagtgtcgtcaccttcaccttcgaacttccttcctagatcgtaaagatagaggaaatcgtccattgtaatctccggggcaaaggagatctcttttggggctggatcactgctgggccttttggttcctagcgtgagccagtgggctttttgctttggtgggcttgttagggccttagcaaagctcttgggcttgagttgagcttctcctttggggatgaagttcaacctgtctgtttgctgacttgttgtgtacgcgtcagctgctgctcttgcctctgtaatagtggcaaatttcttgtgtgcaactccgggaacgccgtttgttgccgcctttgtacaaccccagtcatcgtatataccggcatgtggaccgttatacacaacgtagtagttgatatgagggtgttgaatacccgattctgctctgagaggagcaactgtgctgttaagctcagatttttgtgggattggaattggatcctctagagcaaagcttggcgtaatcatggtcatagctgtttcctgtgtgaaattgttatccgctcacaattccacacaacatacgagccggaagcataaagtgtaaagcctggggtgcctaatgagtgagctaactcacattaattgcgttgcgctcactgcccgctttccagtcgggaaacctgtcgtgccagctgcattaatgaatcggccaacgcgcggggagaggcggtttgcgtattgggccaaagacaaaagggcgacattcaaccgattgagggagggaaggtaaatattgacggaaattattcattaaaggtgaattatcaccgtcaccgacttgagccatttgggaattagagccagcaaaatcaccagtagcaccattaccattagcaaggccggaaacgtcaccaatgaaaccatcatctagtaacatagatgacaccgcgcgcgataatttatcctagtttgcgcgctatattttgttttctatcgcgtattaaatgtataattgcgggactctaatcataaaaacccatctcataaataacgtcatgcattacatgttaattattacatgcttaacgtaattcaacagaaattatatgataatcatcgcaagaccggcaacaggattcaatcttaagaaactttattgccaaatgtttgaacgatctgcttcgacgcactccttctttaggtacggactagatctcggtgacgggcaggaccggacggggcggtaccggcaggctgaagtccagctgccagaaacccacgtcatgccagttcccgtgcttgaagccggccgcccgcagcatgccgcggggggcatatccgagcgcctcgtgcatgcgcacgctcgggtcgttgggcagcccgatgacagcgaccacgctcttgaagccctgtgcctccagggacttcagcaggtgggtgtagagcgtggagcccagtcccgtccgctggtggcggggggagacgtacacggtcgactcggccgtccagtcgtaggcgttgcgtgccttccaggggcccgcgtaggcgatgccggcgacctcgccgtccacctcggcgacgagccagggatagcgctcccgcagacggacgaggtcgtccgtccactcctgcggttcctgcggctcggtacggaagttgaccgtgcttgtctcgatgtagtggttgacgatggtgcagaccgccggcatgtccgcctcggtggcacggcggatgtcggccgggcgtcgttctgggctcatggatctggattgagagtgaatatgagactctaattggataccgaggggaatttatggaacgtcagtggagcatttttgacaagaaatatttgctagctgatagtgaccttaggcgacttttgaacgcgcaataatggtttctgacgtatgtgcttagctcattaaactccagaaacccgcggctgagtggctccttcaacgttgcggttctgtcagttccaaacgtaaaacggcttgtcccgcgtcatcggcgggggtcataacgtgactcccttaattctccgctcatgatcagattgtcgtttcccgccttcagtttaaactatcagtgtttgacaggatatattggcgggtaaacctaagagaaaagagcgtttattagaataatcggatatttaaaagggcgtgaaaaggtttatccgttcgtccatttgtatgtgcatgccaaccacagggttccccagatctggcgccggccagcgagacgagcaagattggccgccgcccgaaacgatccgacagcgcgcccagcacaggtgcgcaggcaaattgcaccaacgcatacagcgccagcagaatgccatagtgggcggtgacgtcgttcgagtgaaccagatcgcgcaggaggcccggcagcaccggcataatcaggccgatgccgacagcgtcgagcgcgacagtgctcagaattacgatcaggggtatgttgggtttcacgtctggcctccggaccagcctccgctggtccgattgaacgcgcggattctttatcactgataagttggtggacatattatgtttatcagtgataaagtgtcaagcatgacaaagttgcagccgaatacagtgatccgtgccgccctggacctgttgaacgaggtcggcgtagacggtctgacgacacgcaaactggcggaacggttgggggttcagcagccggcgctttactggcacttcaggaacaagcgggcgctgctcgacgcactggccgaagccatgctggcggagaatcatacgcattcggtgccgagagccgacgacgactggcgctcatttctgatcgggaatgcccgcagcttcaggcaggcgctgctcgcctaccgcgatggcgcgcgcatccatgccggcacgcgaccgggcgcaccgcagatggaaacggccgacgcgcagcttcgcttcctctgcgaggcgggtttttcggccggggacgccgtcaatgcgctgatgacaatcagctacttcactgttggggccgtgcttgaggagcaggccggcgacagcgatgccggcgagcgcggcggcaccgttgaacaggctccgctctcgccgctgttgcgggccgcgatagacgccttcgacgaagccggtccggacgcagcgttcgagcagggactcgcggtgattgtcgatggattggcgaaaaggaggctcgttgtcaggaacgttgaaggaccgagaaagggtgacgattgatcaggaccgctgccggagcgcaacccactcactacagcagagccatgtagacaacatcccctccccctttccaccgcgtcagacgcccgtagcagcccgctacgggctttttcatgccctgccctagcgtccaagcctcacggccgcgctcggcctctctggcggccttctggcgctcttccgcttcctcgctcactgactcgctgcgctcggtcgttcggctgcggcgagcggtatcagctcactcaaaggcggtaatacggttatccacagaatcaggggataacgcaggaaagaacatgtgagcaaaaggccagcaaaaggccaggaaccgtaaaaaggccgcgttgctggcgtttttccataggctccgcccccctgacgagcatcacaaaaatcgacgctcaagtcagaggtggcgaaacccgacaggactataaagataccaggcgtttccccctggaagctccctcgtgcgctctcctgttccgaccctgccgcttaccggatacctgtccgcctttctcccttcgggaagcgtggcgcttttccgctgcataaccctgcttcggggtcattatagcgattttttcggtatatccatcctttttcgcacgatatacaggattttgccaaagggttcgtgtagactttccttggtgtatccaacggcgtcagccgggcaggataggtgaagtaggcccacccgcgagcgggtgttccttcttcactgtcccttattcgcacctggcggtgctcaacgggaatcctgctctgcgaggctggccggctaccgccggcgtaacagatgagggcaagcggatggctgatgaaaccaagccaaccaggaagggcagcccacctatcaaggtgtactgccttccagacgaacgaagagcgattgaggaaaaggcggcggcggccggcatgagcctgtcggcctacctgctggccgtcggccagggctacaaaatcacgggcgtcgtggactatgagcacgtccgcgagctggcccgcatcaatggcgacctgggccgcctgggcggcctgctgaaactctggctcaccgacgacccgcgcacggcgcggttcggtgatgccacgatcctcgccctgctggcgaagatcgaagagaagcaggacgagcttggcaaggtcatgatgggcgtggtccgcccgagggcagagccatgacttttttagccgctaaaacggccggggggtgcgcgtgattgccaagcacgtccccatgcgctccatcaagaagagcgacttcgcggagctggtgaagtacatcaccgacgagcaaggcaagaccgagcgcctttgcgacgctca

SEQ ID NO: 5 - DNA, 9142 bp, artificial sequence
  vector
ctagttatctgaataaaagagaaagagatcatccatatttcttatcctaaatgaatgtcacgtgtctttataattctttgatgaaccagatgcatttcattaaccaaatccatatacatataaatattaatcatatataattaatatcaattgggttagcaaaacaaatctagtctaggtgtgttttgcgaattcgatatcaagcttgatgggtaccggcgcgcccgatcatccggatatagttcctcctttcagcaaaaaacccctcaagacccgtttagaggccccaaggggttatgctagttattgctcagcggtggcagcagccaactcagcttcctttcgggctttgttagcagccggatcgatccaagctgtacctcactattcctttgccctcggacgagtgctggggcgtcggtttccactatcggcgagtacttctacacagccatcggtccagacggccgcgcttctgcgggcgatttgtgtacgcccgacagtcccggctccggatcggacgattgcgtcgcatcgaccctgcgcccaagctgcatcatcgaaattgccgtcaaccaagctctgatagagttggtcaagaccaatgcggagcatatacgcccggagccgcggcgatcctgcaagctccggatgcctccgctcgaagtagcgcgtctgctgctccatacaagccaaccacggcctccagaagaagatgttggcgacctcgtattgggaatccccgaacatcgcctcgctccagtcaatgaccgctgttatgcggccattgtccgtcaggacattgttggagccgaaatccgcgtgcacgaggtgccggacttcggggcagtcctcggcccaaagcatcagctcatcgagagcctgcgcgacggacgcactgacggtgtcgtccatcacagtttgccagtgatacacatggggatcagcaatcgcgcatatgaaatcacgccatgtagtgtattgaccgattccttgcggtccgaatgggccgaacccgctcgtctggctaagatcggccgcagcgatcgcatccatagcctccgcgaccggctgcagaacagcgggcagttcggtttcaggcaggtcttgcaacgtgacaccctgtgcacggcgggagatgcaataggtcaggctctcgctgaattccccaatgtcaagcacttccggaatcgggagcgcggccgatgcaaagtgccgataaacataacgatctttgtagaaaccatcggcgcagctatttacccgcaggacatatccacgccctcctacatcgaagctgaaagcacgagattcttcgccctccgagagctgcatcaggtcggagacgctgtcgaacttttcgatcagaaacttctcgacagacgtcgcggtgagttcaggcttttccatgggtatatctccttcttaaagttaaacaaaattatttctagagggaaaccgttgtggtctccctatagtgagtcgtattaatttcgcgggatcgagatctgatcaacctgcattaatgaatcggccaacgcgcggggagaggcggtttgcgtattgggcgctcttccgcttcctcgctcactgactcgctgcgctcggtcgttcggctgcggcgagcggtatcagctcactcaaaggcggtaatacggttatccacagaatcaggggataacgcaggaaagaacatgtgagcaaaaggccagcaaaaggccaggaaccgtaaaaaggccgcgttgctggcgtttttccataggctccgcccccctgacgagcatcacaaaaatcgacgctcaagtcagaggtggcgaaacccgacaggactataaagataccaggcgtttccccctggaagctccctcgtgcgctctcctgttccgaccctgccgcttaccggatacctgtccgcctttctcccttcgggaagcgtggcgctttctcaatgctcacgctgtaggtatctcagttcggtgtaggtcgttcgctccaagctgggctgtgtgcacgaaccccccgttcagcccgaccgctgcgccttatccggtaactatcgtcttgagtccaacccggtaagacacgacttatcgccactggcagcagccactggtaacaggattagcagagcgaggtatgtaggcggtgctacagagttcttgaagtggtggcctaactacggctacactagaaggacagtatttggtatctgcgctctgctgaagccagttaccttcggaaaaagagttggtagctcttgatccggcaaacaaaccaccgctggtagcggtggtttttttgtttgcaagcagcagattacgcgcagaaaaaaaggatctcaagaagatcctttgatcttttctacggggtctgacgctcagtggaacgaaaactcacgttaagggattttggtcatgacattaacctataaaaataggcgtatcacgaggccctttcgtctcgcgcgtttcggtgatgacggtgaaaacctctgacacatgcagctcccggagacggtcacagcttgtctgtaagcggatgccgggagcagacaagcccgtcagggcgcgtcagcgggtgttggcgggtgtcggggctggcttaactatgcggcatcagagcagattgtactgagagtgcaccatatggacatattgtcgttagaacgcggctacaattaatacataaccttatgtatcatacacatacgatttaggtgacactatagaacggcgcgccaagctgggtctagaactagaaacgtgatgccacttgttattgaagtcgattacagcatctattctgttttactatttataactttgccatttctgacttttgaaaactatctctggatttcggtatcgctttgtgaagatcgagcaaaagagacgttttgtggacgcaatggtccaaatccgttctacatgaacaaattggtcacaatttccactaaaagtaaataaatggcaagttaaaaaaggaatatgcattttactgattgcctaggtgagctccaagagaagttgaatctacacgtctaccaaccgctaaaaaaagaaaaacattgaatatgtaacctgattccattagcttttgacttcttcaacagattctctacttagatttctaacagaaatattattactagcacatcattttcagtctcactacagcaaaaaatccaacggcacaatacagacaacaggagatatcagactacagagatagatagatgctactgcatgtagtaagttaaataaaaggaaaataaaatgtcttgctaccaaaactactacagactatgatgctcaccacaggccaaatcctgcaactaggacagcattatcttatatatattgtacaaaacaagcatcaaggaacatttggtctaggcaatcagtacctcgttctaccatcaccctcagttatcacatccttgaaggatccattactgggaatcatcggcaacacatgctcctgatggggcacaatgacatcaagaaggtaggggccaggggtgtccaacattctctgaattgccgctctaagctcttccttcttcgtcactcgcgctgccggtatcccacaagcatcagcaaacttgagcatgtttgggaatatctcgctctcgctagacggatctccaagataggtgtgagctctattggacttgtagaacctatcctccaactgaaccaccatacccaaatgctgattgttcaacaacaatatcttaactgggagattctccactcttatagtggccaactcctgaacattcatgatgaaactaccatccccatcaatgtcaaccacaacagccccagggttagcaacagcagcaccaatagccgcaggcaatccaaaacccatggctccaagaccccctgaggtcaaccactgcctcggtctcttgtacttgtaaaactgcgcagcccacatttgatgctgcccaaccccagtactaacaatagcatctccattagtcaactcatcaagaacctcgatagcatgctgcggagaaatcgcgtcctggaatgtcttgtaacccaatggaaacttgtgtttctgcacattaatctcttctctccaacctccaagatcaaacttaccctccactcctttctcctccaaaatcatattaattcccttcaaggccaacttcaaatccgcgcaaaccgacacgtgcgcctgcttgttcttcccaatctcggcagaatcaatatcaatgtgaacaatcttagccctactagcaaaagcctcaagcttcccagtaacacggtcatcaaaccttaccccaaaggcaagcaacaaatcactattgtcaacagcatagttagcataaacagtaccatgcatacccagcatctgaagggaatattcatcaccaataggaaaagttccaagacccattaaagtgctagcaacgggaataccagtgagttcaacaaagcgcctcaattcagcactggaattcaaactgccaccgccgacgtagagaacgggcttttgggcctccatgatgagtctgacaatgtgttccaattgggcctcggcggggggcctgggcagcctggcgaggtaaccggggaggttaacgggctcgtcccaattaggcacggcgagttgctgctgaacgtctttgggaatgtcgatgaggaccggaccggggcggccggaggtggcgacgaagaaagcctcggcgacgacgcgggggatgtcgtcgacgtcgaggatgaggtagttgtgcttcgtgatggatctgctcacctccacgatcggggtttcttggaaggcgtcggtgccgatcatccggcgggcgacctggccggtgatggcgacgactgggacgctgtccattaaagcgtcggcgaggccgctcacgaggttggtggcgccggggccggaggtggcaatgcagacgccggggaggccggaggaacgcgcgtagccttcggcggcgaagacgccgccctgctcgtggcgcgggagcacgttgcggatggcggcggagcgcgtgagcgcctggtggatctccatcgacgcaccgccggggtacgcgaacaccgtcgtcacgccctgcctctccagcgcctccacaaggatgtccgcgcccttgcgaggttcgccggaggcgaaccgtgacacgaagggctccgtggtcggcgcttccttggtgaagggcgccgccgtggggggtttggagatggaacatttgattttgagagcgtggttgggtttggtgagggtttgatgagagagagggagggtggatctagtaatgcgtttggggaaggtggggtgtgaagaggaagaagagaatcgggtggttctggaagcggtggccgccattgtgttgtgtggcatggttatacttcaaaaactgcacaacaagcctagagttagtacctaaacagtaaatttacaacagagagcaaagacacatgcaaaaatttcagccataaaaaaagttataatagaatttaaagcaaaagtttcattttttaaacatatatacaaacaaactggatttgaaggaagggattaattcccctgctcaaagtttgaattcctattgtgacctatactcgaataaaattgaagcctaaggaatgtatgagaaacaagaaaacaaaacaaaactacagacaaacaagtacaattacaaaattcgctaaaattctgtaatcaccaaaccccatctcagtcagcacaaggcccaaggtttattttgaaataaaaaaaaagtgattttatttctcataagctaaaagaaagaaaggcaattatgaaatgatttcgactagatctgaaagtcaaacgcgtattccgcagatattaaagaaagagtagagtttcacatggatcctagatggacccagttgaggaaaaagcaaggcaaagcaaaccagaagtgcaagatccgaaattgaaccacggaatctaggatttggtagagggagaagaaaagtaccttgagaggtagaagagaagagaagagcagagagatatatgaacgagtgtgtcttggtctcaactctgaagcgatacgagtttagaggggagcattgagttccaatttatagggaaaccgggtggcaggggtgagttaatgacggaaaagcccctaagtaacgagattggattgtgggttagattcaaccgtttgcatccgcggcttagattggggaagtcagagtgaatctcaaccgttgactgagttgaaaattgaatgtagcaaccaattgagccaaccccagcctttgccctttgattttgatttgtttgttgcatactttttatttgtcttctggttctgactctctttctctcgtttcaatgccaggttgcctactcccacaccactcacaagaagattctactgttagtattaaatattttttaatgtattaaatgatgaatgcttttgtaaacagaacaagactatgtctaataagtgtcttgcaacattttttaagaaattaaaaaaaatatatttattatcaaaatcaaatgtatgaaaaatcatgaataatataattttatacatttttttaaaaaatcttttaatttcttaattaatatcttaaaaataatgattaatatttaacccaaaataattagtatgattggtaaggaagatatccatgttatgtttggatgtgagtttgatctagagcaaagcttactagagtcgacctgcagcccctccaccgcggtggcggccgctctagagatccgtcaacatggtggagcacgacactctcgtctactccaagaatatcaaagatacagtctcagaagaccaaagggctattgagacttttcaacaaagggtaatatcgggaaacctcctcggattccattgcccagctatctgtcacttcatcaaaaggacagtagaaaaggaaggtggcacctacaaatgccatcattgcgataaaggaaaggctatcgttcaagatgcctctgccgacagtggtcccaaagatggacccccacccacgaggagcatcgtggaaaaagaagacgttccaaccacgtcttcaaagcaagtggattgatgtgatgatcctatgcgtatggtatgacgtgtgttcaagatgatgacttcaaacctacctatgacgtatggtatgacgtgtgtcgactgatgacttagatccactcgagcggctataaatacgtacctacgcaccctgcgctaccatccctagagctgcagcttatttttacaacaattaccaacaacaacaaacaacaaacaacattacaattactatttacaattacagtcgacccatcaacaagtttgtacaaaaaagctgaacgagaaacgtaaaatgatataaatatcaatatattaaattagattttgcataaaaaacagactacataatactgtaaaacacaacatatccagtcatattggcggccgcattaggcaccccaggctttacactttatgcttccggctcgtataatgtgtggattttgagttaggatccgtcgagattttcaggagctaaggaagctaaaatggagaaaaaaatcactggatataccaccgttgatatatcccaatggcatcgtaaagaacattttgaggcatttcagtcagttgctcaatgtacctataaccagaccgttcagctggatattacggcctttttaaagaccgtaaagaaaaataagcacaagttttatccggcctttattcacattcttgcccgcctgatgaatgctcatccggaattccgtatggcaatgaaagacggtgagctggtgatatgggatagtgttcacccttgttacaccgttttccatgagcaaactgaaacgttttcatcgctctggagtgaataccacgacgatttccggcagtttctacacatatattcgcaagatgtggcgtgttacggtgaaaacctggcctatttccctaaagggtttattgagaatatgtttttcgtctcagccaatccctgggtgagtttcaccagttttgatttaaacgtggccaatatggacaacttcttcgcccccgttttcaccatgggcaaatattatacgcaaggcgacaaggtgctgatgccgctggcgattcaggttcatcatgccgtttgtgatggcttccatgtcggcagaatgcttaatgaattacaacagtactgcgatgagtggcagggcggggcgtaaagatctggatccggcttactaaaagccagataacagtatgcgtatttgcgcgctgatttttgcggtataagaatatatactgatatgtatacccgaagtatgtcaaaaagaggtatgctatgaagcagcgtattacagtgacagttgacagcgacagctatcagttgctcaaggcatatatgatgtcaatatctccggtctggtaagcacaaccatgcagaatgaagcccgtcgtctgcgtgccgaacgctggaaagcggaaaatcaggaagggatggctgaggtcgcccggtttattgaaatgaacggctcttttgctgacgagaacaggggctggtgaaatgcagtttaaggtttacacctataaaagagagagccgttatcgtctgtttgtggatgtacagagtgatattattgacacgcccgggcgacggatggtgatccccctggccagtgcacgtctgctgtcagataaagtctcccgtgaactttacccggtggtgcatatcggggatgaaagctggcgcatgatgaccaccgatatggccagtgtgccggtctccgttatcggggaagaagtggctgatctcagccaccgcgaaaatgacatcaaaaacgccattaacctgatgttctggggaatataaatgtcaggctcccttatacacagccagtctgcaggtcgaccatagtgactggatatgttgtgttttacagtattatgtagtctgttttttatgcaaaatctaatttaatatattgatatttatatcattttacgtttctcgttcagctttcttgtacaaagtggttgataacctagacttgtccatcttctggattggccaacttaattaatgtatgaaataaaaggatgcacacatagtgacatgctaatcactataatgtgggcatcaaagttgtgtgttatgtgtaatta

SEQ ID NO: 6 - DNA, 49911 bp, artificial sequence
  vector
gtgcagcgtgacccggtcgtgcccctctctagagataatgagcattgcatgtctaagttataaaaaattaccacatattttttttgtcacacttgtttgaagtgcagtttatctatctttatacatatatttaaactttactctacgaataatataatctatagtactacaataatatcagtgttttagagaatcatataaatgaacagttagacatggtctaaaggacaattgagtattttgacaacaggactctacagttttatctttttagtgtgcatgtgttctcctttttttttgcaaatagcttcacctatataatacttcatccattttattagtacatccatttagggtttagggttaatggtttttatagactaatttttttagtacatctattttattctattttagcctctaaattaagaaaactaaaactctattttagtttttttatttaataatttagatataaaatagaataaaataaagtgactaaaaattaaacaaataccctttaagaaattaaaaaaactaaggaaacatttttcttgtttcgagtagataatgccagcctgttaaacgccgtcgacgagtctaacggacaccaaccagcgaaccagcagcgtcgcgtcgggccaagcgaagcagacggcacggcatctctgtcgctgcctctggacccctctcgagagttccgctccaccgttggacttgctccgctgtcggcatccagaaattgcgtggcggagcggcagacgtgagccggcacggcaggcggcctcctcctcctctcacggcacggcagctacgggggattcctttcccaccgctccttcgctttcccttcctcgcccgccgtaataaatagacaccccctccacaccctctttccccaacctcgtgttgttcggagcgcacacacacacaaccagatctcccccaaatccacccgtcggcacctccgcttcaaggtacgccgctcgtcctccccccccccccctctctaccttctctagatcggcgttccggtccatggttagggcccggtagttctacttctgttcatgtttgtgttagatccgtgtttgtgttagatccgtgctgctagcgttcgtacacggatgcgacctgtacgtcagacacgttctgattgctaacttgccagtgtttctctttggggaatcctgggatggctctagccgttccgcagacgggatcgatttcatgattttttttgtttcgttgcatagggtttggtttgcccttttcctttatttcaatatatgccgtgcacttgtttgtcgggtcatcttttcatgcttttttttgtcttggttgtgatgatgtggtctggttgggcggtcgttctagatcggagtagaattctgtttcaaactacctggtggatttattaattttggatctgtatgtgtgtgccatacatattcatagttacgaattgaagatgatggatggaaatatcgatctaggataggtatacatgttgatgcgggttttactgatgcatatacagagatgctttttgttcgcttggttgtgatgatgtggtgtggttgggcggtcgttcattcgttctagatcggagtagaatactgtttcaaactacctggtgtatttattaattttggaactgtatgtgtgtgtcatacatcttcatagttacgagtttaagatggatggaaatatcgatctaggataggtatacatgttgatgtgggttttactgatgcatatacatgatggcatatgcagcatctattcatatgctctaaccttgagtacctatctattataataaacaagtatgttttataattattttgatcttgatatacttggatgatggcatatgcagcagctatatgtggatttttttagccctgccttcatacgctatttatttgcttggtactgtttcttttgtcgatgctcaccctgttgtttggtgttacttctgcaggtcgactctagaggatccacaagtttgtacaaaaaagctgaacgagaaacgtaaaatgatataaatatcaatatattaaattagattttgcataaaaaacagactacataatactgtaaaacacaacatatccagtcactatggcggccgcattaggcaccccaggctttacactttatgcttccggctcgtataatgtgtggattttgagttaggatttaaatacgcgttgatccggcttactaaaagccagataacagtatgcgtatttgcgcgctgatttttgcggtataagaatatatactgatatgtatacccgaagtatgtcaaaaagaggtatgctatgaagcagcgtattacagtgacagttgacagcgacagctatcagttgctcaaggcatatatgatgtcaatatctccggtctggtaagcacaaccatgcagaatgaagcccgtcgtctgcgtgccgaacgctggaaagcggaaaatcaggaagggatggctgaggtcgcccggtttattgaaatgaacggctcttttgctgacgagaacaggggctggtgaaatgcagtttaaggtttacacctataaaagagagagccgttatcgtctgtttgtggatgtacagagtgatatcattgacacgcccggtcgacggatggtgatccccctggccagtgcacgtctgctgtcagataaagtctcccgtgaactttacccggtggtgcatatcggggatgaaagctggcgcatgatgaccaccgatatggccagtgtgccggtctccgttatcggggaagaagtggctgatctcagccaccgcgaaaatgacatcaaaaacgccattaacctgatgttctggggaatataaatgtcaggctcccttatacacagccagtctgcaggtcgaccatagtgactggatatgttgtgttttacagtattatgtagtctgttttttatgcaaaatctaatttaatatattgatatttatatcattttacgtttctcgttcagctttcttgtacaaagtggtgttaacctagacttgtccatcttctggattggccaacttaattaatgtatgaaataaaaggatgcacacatagtgacatgctaatcactataatgtgggcatcaaagttgtgtgttatgtgtaattactagttatctgaataaaagagaaagagatcatccatatttcttatcctaaatgaatgtcacgtgtctttataattctttgatgaaccagatgcatttcattaaccaaatccatatacatataaatattaatcatatataattaatatcaattgggttagcaaaacaaatctagtctaggtgtgttttgcgaattgcggccgccaccgcggtggagctcgaattccggtccgggtcacctttgtccaccaagatggaactgcggccgctcattaattaagtcaggcgcgcctctagttgaagacacgttcatgtcttcatcgtaagaagacactcagtagtcttcggccagaatggccatctggattcagcaggcctagaaggccatttaaatcctgaggatctggtcttcctaaggacccgggatatcggaccgattaaactttaattcggtccgaagcttgcatgcctgcagtgcagcgtgacccggtcgtgcccctctctagagataatgagcattgcatgtctaagttataaaaaattaccacatattttttttgtcacacttgtttgaagtgcagtttatctatctttatacatatatttaaactttactctacgaataatataatctatagtactacaataatatcagtgttttagagaatcatataaatgaacagttagacatggtctaaaggacaattgagtattttgacaacaggactctacagttttatctttttagtgtgcatgtgttctcctttttttttgcaaatagcttcacctatataatacttcatccattttattagtacatccatttagggtttagggttaatggtttttatagactaatttttttagtacatctattttattctattttagcctctaaattaagaaaactaaaactctattttagtttttttatttaataatttagatataaaatagaataaaataaagtgactaaaaattaaacaaataccctttaagaaattaaaaaaactaaggaaacatttttcttgtttcgagtagataatgccagcctgttaaacgccgtcgacgagtctaacggacaccaaccagcgaaccagcagcgtcgcgtcgggccaagcgaagcagacggcacggcatctctgtcgctgcctctggacccctctcgagagttccgctccaccgttggacttgctccgctgtcggcatccagaaattgcgtggcggagcggcagacgtgagccggcacggcaggcggcctcctcctcctctcacggcaccggcagctacgggggattcctttcccaccgctccttcgctttcccttcctcgcccgccgtaataaatagacaccccctccacaccctctttccccaacctcgtgttgttcggagcgcacacacacacaaccagatctcccccaaatccacccgtcggcacctccgcttcaaggtacgccgctcgtcctcccccccccccctctctaccttctctagatcggcgttccggtccatgcatggttagggcccggtagttctacttctgttcatgtttgtgttagatccgtgtttgtgttagatccgtgctgctagcgttcgtacacggatgcgacctgtacgtcagacacgttctgattgctaacttgccagtgtttctctttggggaatcctgggatggctctagccgttccgcagacgggatcgatttcatgattttttttgtttcgttgcatagggtttggtttgcccttttcctttatttcaatatatgccgtgcacttgtttgtcgggtcatcttttcatgcttttttttgtcttggttgtgatgatgtggtctggttgggcggtcgttctagatcggagtagaattctgtttcaaactacctggtggatttattaattttggatctgtatgtgtgtgccatacatattcatagttacgaattgaagatgatggatggaaatatcgatctaggataggtatacatgttgatgcgggttttactgatgcatatacagagatgctttttgttcgcttggttgtgatgatgtggtgtggttgggcggtcgttcattcgttctagatcggagtagaatactgtttcaaactacctggtgtatttattaattttggaactgtatgtgtgtgtcatacatcttcatagttacgagtttaagatggatggaaatatcgatctaggataggtatacatgttgatgtgggttttactgatgcatatacatgatggcatatgcagcatctattcatatgctctaaccttgagtacctatctattataataaacaagtatgttttataattattttgatcttgatatacttggatgatggcatatgcagcagctatatgtggatttttttagccctgccttcatacgctatttatttgcttggtactgtttcttttgtcgatgctcaccctgttgtttggtgttacttctgcaggtcgactttaacttagcctaggatccacacgacaccatgtcccccgagcgccgccccgtcgagatccgcccggccaccgccgccgacatggccgccgtgtgcgacatcgtgaaccactacatcgagacctccaccgtgaacttccgcaccgagccgcagaccccgcaggagtggatcgacgacctggagcgcctccaggaccgctacccgtggctcgtggccgaggtggagggcgtggtggccggcatcgcctacgccggcccgtggaaggcccgcaacgcctacgactggaccgtggagtccaccgtgtacgtgtcccaccgccaccagcgcctcggcctcggctccaccctctacacccacctcctcaagagcatggaggcccagggcttcaagtccgtggtggccgtgatcggcctcccgaacgacccgtccgtgcgcctccacgaggccctcggctacaccgcccgcggcaccctccgcgccgccggctacaagcacggcggctggcacgacgtcggcttctggcagcgcgacttcgagctgccggccccgccgcgcccggtgcgcccggtgacgcagatctgagtcgaaacctagacttgtccatcttctggattggccaacttaattaatgtatgaaataaaaggatgcacacatagtgacatgctaatcactataatgtgggcatcaaagttgtgtgttatgtgtaattactagttatctgaataaaagagaaagagatcatccatatttcttatcctaaatgaatgtcacgtgtctttataattctttgatgaaccagatgcatttcattaaccaaatccatatacatataaatattaatcatatataattaatatcaattgggttagcaaaacaaatctagtctaggtgtgttttgcgaattgcggccgccaccgcggtggagctcgaattcattccgattaatcgtggcctcttgctcttcaggatgaagagctatgtttaaacgtgcaagcgctactagacaattcagtacattaaaaacgtccgcaatgtgttattaagttgtctaagcgtcaatttggtttacaccacaatatatcctgccaccagccagccaacagctccccgaccggcagctcggcacaaaatcaccactcgatacaggcagcccatcagtccgggacggcgtcagcgggagagccgttgtaaggcggcagactttgctcatgttaccgatgctattcggaagaacggcaactaagctgccgggtttgaaacacggatgatctcgcggagggtagcatgttgattgtaacgatgacagagcgttgctgcctgtgatcaaatatcatctccctcgcagagatccgaattatcagccttcttattcatttctcgcttaaccgtgacaggctgtcgatcttgagaactatgccgacataataggaaatcgctggataaagccgctgaggaagctgagtggcgctatttctttagaagtgaacgttgacgatcgtcgaccgtaccccgatgaattaattcggacgtacgttctgaacacagctggatacttacttgggcgattgtcatacatgacatcaacaatgtacccgtttgtgtaaccgtctcttggaggttcgtatgacactagtggttcccctcagcttgcgactagatgttgaggcctaacattttattagagagcaggctagttgcttagatacatgatcttcaggccgttatctgtcagggcaagcgaaaattggccatttatgacgaccaatgccccgcagaagctcccatctttgccgccatagacgccgcgccccccttttggggtgtagaacatccttttgccagatgtggaaaagaagttcgttgtcccattgttggcaatgacgtagtagccggcgaaagtgcgagacccatttgcgctatatataagcctacgatttccgttgcgactattgtcgtaattggatgaactattatcgtagttgctctcagagttgtcgtaatttgatggactattgtcgtaattgcttatggagttgtcgtagttgcttggagaaatgtcgtagttggatggggagtagtcatagggaagacgagcttcatccactaaaacaattggcaggtcagcaagtgcctgccccgatgccatcgcaagtacgaggcttagaaccaccttcaacagatcgcgcatagtcttccccagctctctaacgcttgagttaagccgcgccgcgaagcggcgtcggcttgaacgaattgttagacattatttgccgactaccttggtgatctcgcctttcacgtagtgaacaaattcttccaactgatctgcgcgcgaggccaagcgatcttcttgtccaagataagcctgcctagcttcaagtatgacgggctgatactgggccggcaggcgctccattgcccagtcggcagcgacatccttcggcgcgattttgccggttactgcgctgtaccaaatgcgggacaacgtaagcactacatttcgctcatcgccagcccagtcgggcggcgagttccatagcgttaaggtttcatttagcgcctcaaatagatcctgttcaggaaccggatcaaagagttcctccgccgctggacctaccaaggcaacgctatgttctcttgcttttgtcagcaagatagccagatcaatgtcgatcgtggctggctcgaagatacctgcaagaatgtcattgcgctgccattctccaaattgcagttcgcgcttagctggataacgccacggaatgatgtcgtcgtgcacaacaatggtgacttctacagcgcggagaatctcgctctctccaggggaagccgaagtttccaaaaggtcgttgatcaaagctcgccgcgttgtttcatcaagccttacagtcaccgtaaccagcaaatcaatatcactgtgtggcttcaggccgccatccactgcggagccgtacaaatgtacggccagcaacgtcggttcgagatggcgctcgatgacgccaactacctctgatagttgagtcgatacttcggcgatcaccgcttccctcatgatgtttaactcctgaattaagccgcgccgcgaagcggtgtcggcttgaatgaattgttaggcgtcatcctgtgctcccgagaaccagtaccagtacatcgctgtttcgttcgagacttgaggtctagttttatacgtgaacaggtcaatgccgccgagagtaaagccacattttgcgtacaaattgcaggcaggtacattgttcgtttgtgtctctaatcgtatgccaaggagctgtctgcttagtgcccactttttcgcaaattcgatgagactgtgcgcgactcctttgcctcggtgcgtgtgcgacacaacaatgtgttcgatagaggctagatcgttccatgttgagttgagttcaatcttcccgacaagctcttggtcgatgaatgcgccatagcaagcagagtcttcatcagagtcatcatccgagatgtaatccttccggtaggggctcacacttctggtagatagttcaaagccttggtcggataggtgcacatcgaacacttcacgaacaatgaaatggttctcagcatccaatgtttccgccacctgctcagggatcaccgaaatcttcatatgacgcctaacgcctggcacagcggatcgcaaacctggcgcggcttttggcacaaaaggcgtgacaggtttgcgaatccgttgctgccacttgttaacccttttgccagatttggtaactataatttatgttagaggcgaagtcttgggtaaaaactggcctaaaattgctggggatttcaggaaagtaaacatcaccttccggctcgatgtctattgtagatatatgtagtgtatctacttgatcgggggatctgctgcctcgcgcgtttcggtgatgacggtgaaaacctctgacacatgcagctcccggagacggtcacagcttgtctgtaagcggatgccgggagcagacaagcccgtcagggcgcgtcagcgggtgttggcgggtgtcggggcgcagccatgacccagtcacgtagcgatagcggagtgtatactggcttaactatgcggcatcagagcagattgtactgagagtgcaccatatgcggtgtgaaataccgcacagatgcgtaaggagaaaataccgcatcaggcgctcttccgcttcctcgctcactgactcgctgcgctcggtcgttcggctgcggcgagcggtatcagctcactcaaaggcggtaatacggttatccacagaatcaggggataacgcaggaaagaacatgtgagcaaaaggccagcaaaaggccaggaaccgtaaaaaggccgcgttgctggcgtttttccataggctccgcccccctgacgagcatcacaaaaatcgacgctcaagtcagaggtggcgaaacccgacaggactataaagataccaggcgtttccccctggaagctccctcgtgcgctctcctgttccgaccctgccgcttaccggatacctgtccgcctttctcccttcgggaagcgtggcgctttctcatagctcacgctgtaggtatctcagttcggtgtaggtcgttcgctccaagctgggctgtgtgcacgaaccccccgttcagcccgaccgctgcgccttatccggtaactatcgtcttgagtccaacccggtaagacacgacttatcgccactggcagcagccactggtaacaggattagcagagcgaggtatgtaggcggtgctacagagttcttgaagtggtggcctaactacggctacactagaaggacagtatttggtatctgcgctctgctgaagccagttaccttcggaaaaagagttggtagctcttgatccggcaaacaaaccaccgctggtagcggtggtttttttgtttgcaagcagcagattacgcgcagaaaaaaaggatctcaagaagatcctttgatcttttctacggggtctgacgctcagtggaacgaaaactcacgttaagggattttggtcatgagattatcaaaaaggatcttcacctagatccttttaaattaaaaatgaagttttaaatcaatctaaagtatatatgagtaaacttggtctgacagttaccaatgcttaatcagtgaggcacctatctcagcgatctgtctatttcgttcatccatagttgcctgactccccgtcgtgtagataactacgatacgggagggcttaccatctggccccagtgctgcaatgataccgcgagacccacgctcaccggctccagatttatcagcaataaaccagccagccggaagggccgagcgcagaagtggtcctgcaactttatccgcctccatccagtctattaattgttgccgggaagctagagtaagtagttcgccagttaatagtttgcgcaacgttgttgccattgctgcagggggggggggggggggggacttccattgttcattccacggacaaaaacagagaaaggaaacgacagaggccaaaaagcctcgctttcagcacctgtcgtttcctttcttttcagagggtattttaaataaaaacattaagttatgacgaagaagaacggaaacgccttaaaccggaaaattttcataaatagcgaaaacccgcgaggtcgccgccccgtaacctacctgtcggatcaccggaaaggacccgtaaagtgataatgattatcatctacatatcacaacgtgcgtggaggccatcaaaccacgtcaaataatcaattatgacgcaggtatcgtattaattgatctgcatcaacttaacgtaaaaacaacttcagacaatacaaatcagcgacactgaatacggggcaacctcatgtcccccccccccccccccctgcaggcatcgtggtgtcacgctcgtcgtttggtatggcttcattcagctccggttcccaacgatcaaggcgagttacatgatcccccatgttgtgcaaaaaagcggttagctccttcggtcctccgatcgttgtcagaagtaagttggccgcagtgttatcactcatggttatggcagcactgcataattctcttactgtcatgccatccgtaagatgcttttctgtgactggtgagtactcaaccaagtcattctgagaatagtgtatgcggcgaccgagttgctcttgcccggcgtcaacacgggataataccgcgccacatagcagaactttaaaagtgctcatcattggaaaacgttcttcggggcgaaaactctcaaggatcttaccgctgttgagatccagttcgatgtaacccactcgtgcacccaactgatcttcagcatcttttactttcaccagcgtttctgggtgagcaaaaacaggaaggcaaaatgccgcaaaaaagggaataagggcgacacggaaatgttgaatactcatactcttcctttttcaatattattgaagcatttatcagggttattgtctcatgagcggatacatatttgaatgtatttagaaaaataaacaaataggggttccgcgcacatttccccgaaaagtgccacctgacgtctaagaaaccattattatcatgacattaacctataaaaataggcgtatcacgaggccctttcgtcttcaagaattcggagcttttgccattctcaccggattcagtcgtcactcatggtgatttctcacttgataaccttatttttgacgaggggaaattaataggttgtattgatgttggacgagtcggaatcgcagaccgataccaggatcttgccatcctatggaactgcctcggtgagttttctccttcattacagaaacggctttttcaaaaatatggtattgataatcctgatatgaataaattgcagtttcatttgatgctcgatgagtttttctaatcagaattggttaattggttgtaacactggcagagcattacgctgacttgacgggacggcggctttgttgaataaatcgaacttttgctgagttgaaggatcagatcacgcatcttcccgacaacgcagaccgttccgtggcaaagcaaaagttcaaaatcaccaactggtccacctacaacaaagctctcatcaaccgtggctccctcactttctggctggatgatggggcgattcaggcctggtatgagtcagcaacaccttcttcacgaggcagacctcagcgccagaaggccgccagagaggccgagcgcggccgtgaggcttggacgctagggcagggcatgaaaaagcccgtagcgggctgctacgggcgtctgacgcggtggaaagggggaggggatgttgtctacatggctctgctgtagtgagtgggttgcgctccggcagcggtcctgatcaatcgtcaccctttctcggtccttcaacgttcctgacaacgagcctccttttcgccaatccatcgacaatcaccgcgagtccctgctcgaacgctgcgtccggaccggcttcgtcgaaggcgtctatcgcggcccgcaacagcggcgagagcggagcctgttcaacggtgccgccgcgctcgccggcatcgctgtcgccggcctgctcctcaagcacggccccaacagtgaagtagctgattgtcatcagcgcattgacggcgtccccggccgaaaaacccgcctcgcagaggaagcgaagctgcgcgtcggccgtttccatctgcggtgcgcccggtcgcgtgccggcatggatgcgcgcgccatcgcggtaggcgagcagcgcctgcctgaagctgcgggcattcccgatcagaaatgagcgccagtcgtcgtcggctctcggcaccgaatgcgtatgattctccgccagcatggcttcggccagtgcgtcgagcagcgcccgcttgttcctgaagtgccagtaaagcgccggctgctgaacccccaaccgttccgccagtttgcgtgtcgtcagaccgtctacgccgacctcgttcaacaggtccagggcggcacggatcactgtattcggctgcaactttgtcatgcttgacactttatcactgataaacataatatgtccaccaacttatcagtgataaagaatccgcgcgttcaatcggaccagcggaggctggtccggaggccagacgtgaaacccaacatacccctgatcgtaattctgagcactgtcgcgctcgacgctgtcggcatcggcctgattatgccggtgctgccgggcctcctgcgcgatctggttcactcgaacgacgtcaccgcccactatggcattctgctggcgctgtatgcgttggtgcaatttgcctgcgcacctgtgctgggcgcgctgtcggatcgtttcgggcggcggccaatcttgctcgtctcgctggccggcgccactgtcgactacgccatcatggcgacagcgcctttcctttgggttctctatatcgggcggatcgtggccggcatcaccggggcgactggggcggtagccggcgcttatattgccgatatcactgatggcgatgagcgcgcgcggcacttcggcttcatgagcgcctgtttcgggttcgggatggtcgcgggacctgtgctcggtgggctgatgggcggtttctccccccacgctccgttcttcgccgcggcagccttgaacggcctcaatttcctgacgggctgtttccttttgccggagtcgcacaaaggcgaacgccggccgttacgccgggaggctctcaacccgctcgcttcgttccggtgggcccggggcatgaccgtcgtcgccgccctgatggcggtcttcttcatcatgcaacttgtcggacaggtgccggccgcgctttgggtcattttcggcgaggatcgctttcactgggacgcgaccacgatcggcatttcgcttgccgcatttggcattctgcattcactcgcccaggcaatgatcaccggccctgtagccgcccggctcggcgaaaggcgggcactcatgctcggaatgattgccgacggcacaggctacatcctgcttgccttcgcgacacggggatggatggcgttcccgatcatggtcctgcttgcttcgggtggcatcggaatgccggcgctgcaagcaatgttgtccaggcaggtggatgaggaacgtcaggggcagctgcaaggctcactggcggcgctcaccagcctgacctcgatcgtcggacccctcctcttcacggcgatctatgcggcttctataacaacgtggaacgggtgggcatggattgcaggcgctgccctctacttgctctgcctgccggcgctgcgtcgcgggctttggagcggcgcagggcaacgagccgatcgctgatcgtggaaacgataggcctatgccatgcgggtcaaggcgacttccggcaagctatacgcgccctaggagtgcggttggaacgttggcccagccagatactcccgatcacgagcaggacgccgatgatttgaagcgcactcagcgtctgatccaagaacaaccatcctagcaacacggcggtccccgggctgagaaagcccagtaaggaaacaactgtaggttcgagtcgcgagatcccccggaaccaaaggaagtaggttaaacccgctccgatcaggccgagccacgccaggccgagaacattggttcctgtaggcatcgggattggcggatcaaacactaaagctactggaacgagcagaagtcctccggccgccagttgccaggcggtaaaggtgagcagaggcacgggaggttgccacttgcgggtcagcacggttccgaacgccatggaaaccgcccccgccaggcccgctgcgacgccgacaggatctagcgctgcgtttggtgtcaacaccaacagcgccacgcccgcagttccgcaaatagcccccaggaccgccatcaatcgtatcgggctacctagcagagcggcagagatgaacacgaccatcagcggctgcacagcgcctaccgtcgccgcgaccccgcccggcaggcggtagaccgaaataaacaacaagctccagaatagcgaaatattaagtgcgccgaggatgaagatgcgcatccaccagattcccgttggaatctgtcggacgatcatcacgagcaataaacccgccggcaacgcccgcagcagcataccggcgacccctcggcctcgctgttcgggctccacgaaaacgccggacagatgcgccttgtgagcgtccttggggccgtcctcctgtttgaagaccgacagcccaatgatctcgccgtcgatgtaggcgccgaatgccacggcatctcgcaaccgttcagcgaacgcctccatgggctttttctcctcgtgctcgtaaacggacccgaacatctctggagctttcttcagggccgacaatcggatctcgcggaaatcctgcacgtcggccgctccaagccgtcgaatctgagccttaatcacaattgtcaattttaatcctctgtttatcggcagttcgtagagcgcgccgtgcgtcccgagcgatactgagcgaagcaagtgcgtcgagcagtgcccgcttgttcctgaaatgccagtaaagcgctggctgctgaacccccagccggaactgaccccacaaggccctagcgtttgcaatgcaccaggtcatcattgacccaggcgtgttccaccaggccgctgcctcgcaactcttcgcaggcttcgccgacctgctcgcgccacttcttcacgcgggtggaatccgatccgcacatgaggcggaaggtttccagcttgagcgggtacggctcccggtgcgagctgaaatagtcgaacatccgtcgggccgtcggcgacagcttgcggtacttctcccatatgaatttcgtgtagtggtcgccagcaaacagcacgacgatttcctcgtcgatcaggacctggcaacgggacgttttcttgccacggtccaggacgcggaagcggtgcagcagcgacaccgattccaggtgcccaacgcggtcggacgtgaagcccatcgccgtcgcctgtaggcgcgacaggcattcctcggccttcgtgtaataccggccattgatcgaccagcccaggtcctggcaaagctcgtagaacgtgaaggtgatcggctcgccgataggggtgcgcttcgcgtactccaacacctgctgccacaccagttcgtcatcgtcggcccgcagctcgacgccggtgtaggtgatcttcacgtccttgttgacgtggaaaatgaccttgttttgcagcgcctcgcgcgggattttcttgttgcgcgtggtgaacagggcagagcgggccgtgtcgtttggcatcgctcgcatcgtgtccggccacggcgcaatatcgaacaaggaaagctgcatttccttgatctgctgcttcgtgtgtttcagcaacgcggcctgcttggcctcgctgacctgttttgccaggtcctcgccggcggtttttcgcttcttggtcgtcatagttcctcgcgtgtcgatggtcatcgacttcgccaaacctgccgcctcctgttcgagacgacgcgaacgctccacggcggccgatggcgcgggcagggcagggggagccagttgcacgctgtcgcgctcgatcttggccgtagcttgctggaccatcgagccgacggactggaaggtttcgcggggcgcacgcatgacggtgcggcttgcgatggtttcggcatcctcggcggaaaaccccgcgtcgatcagttcttgcctgtatgccttccggtcaaacgtccgattcattcaccctccttgcgggattgccccgactcacgccggggcaatgtgcccttattcctgatttgacccgcctggtgccttggtgtccagataatccaccttatcggcaatgaagtcggtcccgtagaccgtctggccgtccttctcgtacttggtattccgaatcttgccctgcacgaataccagcgaccccttgcccaaatacttgccgtgggcctcggcctgagagccaaaacacttgatgcggaagaagtcggtgcgctcctgcttgtcgccggcatcgttgcgccactcttcattaaccgctatatcgaaaattgcttgcggcttgttagaattgccatgacgtacctcggtgtcacgggtaagattaccgataaactggaactgattatggctcatatcgaaagtctccttgagaaaggagactctagtttagctaaacattggttccgctgtcaagaactttagcggctaaaattttgcgggccgcgaccaaaggtgcgaggggcggcttccgctgtgtacaaccagatatttttcaccaacatccttcgtctgctcgatgagcggggcatgacgaaacatgagctgtcggagagggcaggggtttcaatttcgtttttatcagacttaaccaacggtaaggccaacccctcgttgaaggtgatggaggccattgccgacgccctggaaactcccctacctcttctcctggagtccaccgaccttgaccgcgaggcactcgcggagattgcgggtcatcctttcaagagcagcgtgccgcccggatacgaacgcatcagtgtggttttgccgtcacataaggcgtttatcgtaaagaaatggggcgacgacacccgaaaaaagctgcgtggaaggctctgacgccaagggttagggcttgcacttccttctttagccgctaaaacggccccttctctgcgggccgtcggctcgcgcatcatatcgacatcctcaacggaagccgtgccgcgaatggcatcgggcgggtgcgctttgacagttgttttctatcagaacccctacgtcgtgcggttcgattagctgtttgtcttgcaggctaaacactttcggtatatcgtttgcctgtgcgataatgttgctaatgatttgttgcgtaggggttactgaaaagtgagcgggaaagaagagtttcagaccatcaaggagcgggccaagcgcaagctggaacgcgacatgggtgcggacctgttggccgcgctcaacgacccgaaaaccgttgaagtcatgctcaacgcggacggcaaggtgtggcacgaacgccttggcgagccgatgcggtacatctgcgacatgcggcccagccagtcgcaggcgattatagaaacggtggccggattccacggcaaagaggtcacgcggcattcgcccatcctggaaggcgagttccccttggatggcagccgctttgccggccaattgccgccggtcgtggccgcgccaacctttgcgatccgcaagcgcgcggtcgccatcttcacgctggaacagtacgtcgaggcgggcatcatgacccgcgagcaatacgaggtcattaaaagcgccgtcgcggcgcatcgaaacatcctcgtcattggcggtactggctcgggcaagaccacgctcgtcaacgcgatcatcaatgaaatggtcgccttcaacccgtctgagcgcgtcgtcatcatcgaggacaccggcgaaatccagtgcgccgcagagaacgccgtccaataccacaccagcatcgacgtctcgatgacgctgctgctcaagacaacgctgcgtatgcgccccgaccgcatcctggtcggtgaggtacgtggccccgaagcccttgatctgttgatggcctggaacaccgggcatgaaggaggtgccgccaccctgcacgcaaacaaccccaaagcgggcctgagccggctcgccatgcttatcagcatgcacccggattcaccgaaacccattgagccgctgattggcgaggcggttcatgtggtcgtccatatcgccaggacccctagcggccgtcgagtgcaagaaattctcgaagttcttggttacgagaacggccagtacatcaccaaaaccctgtaaggagtatttccaatgacaacggctgttccgttccgtctgaccatgaatcgcggcattttgttctaccttgccgtgttcttcgttctcgctctcgcgttatccgcgcatccggcgatggcctcggaaggcaccggcggcagcttgccatatgagagctggctgacgaacctgcgcaactccgtaaccggcccggtggccttcgcgctgtccatcatcggcatcgtcgtcgccggcggcgtgctgatcttcggcggcgaactcaacgccttcttccgaaccctgatcttcctggttctggtgatggcgctgctggtcggcgcgcagaacgtgatgagcaccttcttcggtcgtggtgccgaaatcgcggccctcggcaacggggcgctgcaccaggtgcaagtcgcggcggcggatgccgtgcgtgcggtagcggctggacggctcgcctaatcatggctctgcgcacgatccccatccgtcgcgcaggcaaccgagaaaacctgttcatgggtggtgatcgtgaactggtgatgttctcgggcctgatggcgtttgcgctgattttcagcgcccaagagctgcgggccaccgtggtcggtctgatcctgtggttcggggcgctctatgcgttccgaatcatggcgaaggccgatccgaagatgcggttcgtgtacctgcgtcaccgccggtacaagccgtattacccggcccgctcgaccccgttccgcgagaacaccaatagccaagggaagcaataccgatgatccaagcaattgcgattgcaatcgcgggcctcggcgcgcttctgttgttcatcctctttgcccgcatccgcgcggtcgatgccgaactgaaactgaaaaagcatcgttccaaggacgccggcctggccgatctgctcaactacgccgctgtcgtcgatgacggcgtaatcgtgggcaagaacggcagctttatggctgcctggctgtacaagggcgatgacaacgcaagcagcaccgaccagcagcgcgaagtagtgtccgcccgcatcaaccaggccctcgcgggcctgggaagtgggtggatgatccatgtggacgccgtgcggcgtcctgctccgaactacgcggagcggggcctgtcggcgttccctgaccgtctgacggcagcgattgaagaagagcgctcggtcttgccttgctcgtcggtgatgtacttcaccagctccgcgaagtcgctcttcttgatggagcgcatggggacgtgcttggcaatcacgcgcaccccccggccgttttagcggctaaaaaagtcatggctctgccctcgggcggaccacgcccatcatgaccttgccaagctcgtcctgcttctcttcgatcttcgccagcagggcgaggatcgtggcatcaccgaaccgcgccgtgcgcgggtcgtcggtgagccagagtttcagcaggccgcccaggcggcccaggtcgccattgatgcgggccagctcgcggacgtgctcatagtccacgacgcccgtgattttgtagccctggccgacggccagcaggtaggccgacaggctcatgccggccgccgccgccttttcctcaatcgctcttcgttcgtctggaaggcagtacaccttgataggtgggctgcccttcctggttggcttggtttcatcagccatccgcttgccctcatctgttacgccggcggtagccggccagcctcgcagagcaggattcccgttgagcaccgccaggtgcgaataagggacagtgaagaaggaacacccgctcgcgggtgggcctacttcacctatcctgcccggctgacgccgttggatacaccaaggaaagtctacacgaaccctttggcaaaatcctgtatatcgtgcgaaaaaggatggatataccgaaaaaatcgctataatgaccccgaagcagggttatgcagcggaaaagcgctgcttccctgctgttttgtggaatatctaccgactggaaacaggcaaatgcaggaaattactgaactgaggggacaggcgagagacgatgccaaagagctacaccgacgagctggccgagtgggttgaatcccgcgcggccaagaagcgccggcgtgatgaggctgcggttgcgttcctggcggtgagggcggatgtcgaggcggcgttagcgtccggctatgcgctcgtcaccatttgggagcacatgcgggaaacggggaaggtcaagttctcctacgagacgttccgctcgcacgccaggcggcacatcaaggccaagcccgccgatgtgcccgcaccgcaggccaaggctgcggaacccgcgccggcacccaagacgccggagccacggcggccgaagcaggggggcaaggctgaaaagccggcccccgctgcggccccgaccggcttcaccttcaacccaacaccggacaaaaaggatctactgtaatggcgaaaattcacatggttttgcagggcaagggcggggtcggcaagtcggccatcgccgcgatcattgcgcagtacaagatggacaaggggcagacacccttgtgcatcgacaccgacccggtgaacgcgacgttcgagggctacaaggccctgaacgtccgccggctgaacatcatggccggcgacgaaattaactcgcgcaacttcgacaccctggtcgagctgattgcgccgaccaaggatgacgtggtgatcgacaacggtgccagctcgttcgtgcctctgtcgcattacctcatcagcaaccaggtgccggctctgctgcaagaaatggggcatgagctggtcatccataccgtcgtcaccggcggccaggctctcctggacacggtgagcggcttcgcccagctcgccagccagttcccggccgaagcgcttttcgtggtctggctgaacccgtattgggggcctatcgagcatgagggcaagagctttgagcagatgaaggcgtacacggccaacaaggcccgcgtgtcgtccatcatccagattccggccctcaaggaagaaacctacggccgcgatttcagcgacatgctgcaagagcggctgacgttcgaccaggcgctggccgatgaatcgctcacgatcatgacgcggcaacgcctcaagatcgtgcggcgcggcctgtttgaacagctcgacgcggcggccgtgctatgagcgaccagattgaagagctgatccgggagattgcggccaagcacggcatcgccgtcggccgcgacgacccggtgctgatcctgcataccatcaacgcccggctcatggccgacagtgcggccaagcaagaggaaatccttgccgcgttcaaggaagagctggaagggatcgcccatcgttggggcgaggacgccaaggccaaagcggagcggatgctgaacgcggccctggcggccagcaaggacgcaatggcgaaggtaatgaaggacagcgccgcgcaggcggccgaagcgatccgcagggaaatcgacgacggccttggccgccagctcgcggccaaggtcgcggacgcgcggcgcgtggcgatgatgaacatgatcgccggcggcatggtgttgttcgcggccgccctggtggtgtgggcctcgttatgaatcgcagaggcgcagatgaaaaagcccggcgttgccgggctttgtttttgcgttagctgggcttgtttgacaggcccaagctctgactgcgcccgcgctcgcgctcctgggcctgtttcttctcctgctcctgcttgcgcatcagggcctggtgccgtcgggctgcttcacgcatcgaatcccagtcgccggccagctcgggatgctccgcgcgcatcttgcgcgtcgccagttcctcgatcttgggcgcgtgaatgcccatgccttccttgatttcgcgcaccatgtccagccgcgtgtgcagggtctgcaagcgggcttgctgttgggcctgctgctgctgccaggcggcctttgtacgcggcagggacagcaagccgggggcattggactgtagctgctgcaaacgcgcctgctgacggtctacgagctgttctaggcggtcctcgatgcgctccacctggtcatgctttgcctgcacgtagagcgcaagggtctgctggtaggtctgctcgatgggcgcggattctaagagggcctgctgttccgtctcggcctcctgggccgcctgtagcaaatcctcgccgctgttgccgctggactgctttactgccggggactgctgttgccctgctcgcgccgtcgtcgcagttcggcttgcccccactcgattgactgcttcatttcgagccgcagcgatgcgatctcggattgcgtcaacggacggggcagcgcggaggtgtccggcttctccttgggtgagtcggtcgatgccatagccaaaggtttccttccaaaatgcgtccattgctggaccgtgtttctcattgatgcccgcaagcatcttcggcttgaccgccaggtcaagcgcgccttcatgggcggtcatgacggacgccgccatgaccttgccgccgttgttctcgatgtagccgcgtaatgaggcaatggtgccgcccatcgtcagcgtgtcatcgacaacgatgtacttctggccggggatcacctccccctcgaaagtcgggttgaacgccaggcgatgatctgaaccggctccggttcgggcgaccttctcccgctgcacaatgtccgtttcgacctcaaggccaaggcggtcggccagaacgaccgccatcatggccggaatcttgttgttccccgccgcctcgacggcgaggactggaacgatgcggggcttgtcgtcgccgatcagcgtcttgagctgggcaacagtgtcgtccgaaatcaggcgctcgaccaaattaagcgccgcttccgcgtcgccctgcttcgcagcctggtattcaggctcgttggtcaaagaaccaaggtcgccgttgcgaaccaccttcgggaagtctccccacggtgcgcgctcggctctgctgtagctgctcaagacgcctccctttttagccgctaaaactctaacgagtgcgcccgcgactcaacttgacgctttcggcacttacctgtgccttgccacttgcgtcataggtgatgcttttcgcactcccgatttcaggtactttatcgaaatctgaccgggcgtgcattacaaagttcttccccacctgttggtaaatgctgccgctatctgcgtggacgatgctgccgtcgtggcgctgcgacttatcggccttttgggccatatagatgttgtaaatgccaggtttcagggccccggctttatctaccttctggttcgtccatgcgccttggttctcggtctggacaattctttgcccattcatgaccaggaggcggtgtttcattgggtgactcctgacggttgcctctggtgttaaacgtgtcctggtcgcttgccggctaaaaaaaagccgacctcggcagttcgaggccggctttccctagagccgggcgcgtcaaggttgttccatctattttagtgaactgcgttcgatttatcagttactttcctcccgctttgtgtttcctcccactcgtttccgcgtctagccgacccctcaacatagcggcctcttcttgggctgcctttgcctcttgccgcgcttcgtcacgctcggcttgcaccgtcgtaaagcgctcggcctgcctggccgcctcttgcgccgccaacttcctttgctcctggtgggcctcggcgtcggcctgcgccttcgctttcaccgctgccaactccgtgcgcaaactctccgcttcgcgcctggtggcgtcgcgctcgccgcgaagcgcctgcatttcctggttggccgcgtccagggtcttgcggctctcttctttgaatgcgcgggcgtcctggtgagcgtagtccagctcggcgcgcagctcctgcgctcgacgctccacctcgtcggcccgctgcgtcgccagcgcggcccgctgctcggctcctgccagggcggtgcgtgcttcggccagggcttgccgctggcgtgcggccagctcggccgcctcggcggcctgctgctctagcaatgtaacgcgcgcctgggcttcttccagctcgcgggcctgcgcctcgaaggcgtcggccagctccccgcgcacggcttccaactcgttgcgctcacgatcccagccggcttgcgctgcctgcaacgattcattggcaagggcctgggcggcttgccagagggcggccacggcctggttgccggcctgctgcaccgcgtccggcacctggactgccagcggggcggcctgcgccgtgcgctggcgtcgccattcgcgcatgccggcgctggcgtcgttcatgttgacgcgggcggccttacgcactgcatccacggtcgggaagttctcccggtcgccttgctcgaacagctcgtccgcagccgcaaaaatgcggtcgcgcgtctctttgttcagttccatgttggctccggtaattggtaagaataataatactcttacctaccttatcagcgcaagagtttagctgaacagttctcgacttaacggcaggttttttagcggctgaagggcaggcaaaaaaagccccgcacggtcggcgggggcaaagggtcagcgggaaggggattagcgggcgtcgggcttcttcatgcgtcggggccgcgcttcttgggatggagcacgacgaagcgcgcacgcgcatcgtcctcggccctatcggcccgcgtcgcggtcaggaacttgtcgcgcgctaggtcctccctggtgggcaccaggggcatgaactcggcctgctcgatgtaggtccactccatgaccgcatcgcagtcgaggccgcgttccttcaccgtctcttgcaggtcgcggtacgcccgctcgttgagcggctggtaacgggccaattggtcgtaaatggctgtcggccatgagcggcctttcctgttgagccagcagccgacgacgaagccggcaatgcaggcccctggcacaaccaggccgacgccgggggcaggggatggcagcagctcgccaaccaggaaccccgccgcgatgatgccgatgccggtcaaccagcccttgaaactatccggccccgaaacacccctgcgcattgcctggatgctgcgccggatagcttgcaacatcaggagccgtttcttttgttcgtcagtcatggtccgccctcaccagttgttcgtatcggtgtcggacgaactgaaatcgcaagagctgccggtatcggtccagccgctgtccgtgtcgctgctgccgaagcacggcgaggggtccgcgaacgccgcagacggcgtatccggccgcagcgcatcgcccagcatggccccggtcagcgagccgccggccaggtagcccagcatggtgctgttggtcgccccggccaccagggccgacgtgacgaaatcgccgtcattccctctggattgttcgctgctcggcggggcagtgcgccgcgccggcggcgtcgtggatggctcgggttggctggcctgcgacggccggcgaaaggtgcgcagcagctcgttatcgaccggctgcggcgtcggggccgccgccttgcgctgcggtcggtgttccttcttcggctcgcgcagcttgaacagcatgatcgcggaaaccagcagcaacgccgcgcctacgcctcccgcgatgtagaacagcatcggattcattcttcggtcctccttgtagcggaaccgttgtctgtgcggcgcgggtggcccgcgccgctgtctttggggatcagccctcgatgagcgcgaccagtttcacgtcggcaaggttcgcctcgaactcctggccgtcgtcctcgtacttcaaccaggcatagccttccgccggcggccgacggttgaggataaggcgggcagggcgctcgtcgtgctcgacctggacgatggcctttttcagcttgtccgggtccggctccttcgcgcccttttccttggcgtccttaccgtcctggtcgccgtcctcgccgtcctggccgtcgccggcctccgcgtcacgctcggcatcagtctggccgttgaaggcatcgacggtgttgggatcgcggcccttctcgtccaggaactcgcgcagcagcttgaccgtgccgcgcgtgatttcctgggtgtcgtcgtcaagccacgcctcgacttcctccgggcgcttcttgaaggccgtcaccagctcgttcaccacggtcacgtcgcgcacgcggccggtgttgaacgcatcggcgatcttctccggcaggtccagcagcgtgacgtgctgggtgatgaacgccggcgacttgccgatttccttggcgatatcgcctttcttcttgcccttcgccagctcgcggccaatgaagtcggcaatttcgcgcggggtcagctcgttgcgttgcaggttctcgataacctggtcggcttcgttgtagtcgttgtcgatgaacgccgggatggacttcttgccggcccacttcgagccacggtagcggcgggcgccgtgattgatgatatagcggcccggctgctcctggttctcgcgcaccgaaatgggtgacttcaccccgcgctctttgatcgtggcaccgatttccgcgatgctctccggggaaaagccggggttgtcggccgtccgcggctgatgcggatcttcgtcgatcaggtccaggtccagctcgatagggccggaaccgccctgagacgccgcaggagcgtccaggaggctcgacaggtcgccgatgctatccaaccccaggccggacggctgcgccgcgcctgcggcttcctgagcggccgcagcggtgtttttcttggtggtcttggcttgagccgcagtcattgggaaatctccatcttcgtgaacacgtaatcagccagggcgcgaacctctttcgatgccttgcgcgcggccgttttcttgatcttccagaccggcacaccggatgcgagggcatcggcgatgctgctgcgcaggccaacggtggccggaatcatcatcttggggtacgcggccagcagctcggcttggtggcgcgcgtggcgcggattccgcgcatcgaccttgctgggcaccatgccaaggaattgcagcttggcgttcttctggcgcacgttcgcaatggtcgtgaccatcttcttgatgccctggatgctgtacgcctcaagctcgatgggggacagcacatagtcggccgcgaagagggcggccgccaggccgacgccaagggtcggggccgtgtcgatcaggcacacgtcgaagccttggttcgccagggccttgatgttcgccccgaacagctcgcgggcgtcgtccagcgacagccgttcggcgttcgccagtaccgggttggactcgatgagggcgaggcgcgcggcctggccgtcgccggctgcgggtgcggtttcggtccagccgccggcagggacagcgccgaacagcttgcttgcatgcaggccggtagcaaagtccttgagcgtgtaggacgcattgccctgggggtccaggtcgatcacggcaacccgcaagccgcgctcgaaaaagtcgaaggcaagatgcacaagggtcgaagtcttgccgacgccgcctttctggttggccgtgaccaaagttttcatcgtttggtttcctgttttttcttggcgtccgcttcccacttccggacgatgtacgcctgatgttccggcagaaccgccgttacccgcgcgtacccctcgggcaagttcttgtcctcgaacgcggcccacacgcgatgcaccgcttgcgacactgcgcccctggtcagtcccagcgacgttgcgaacgtcgcctgtggcttcccatcgactaagacgccccgcgctatctcgatggtctgctgccccacttccagcccctggatcgcctcctggaactggctttcggtaagccgtttcttcatggataacacccataatttgctccgcgccttggttgaacatagcggtgacagccgccagcacatgagagaagtttagctaaacatttctcgcacgtcaacacctttagccgctaaaactcgtccttggcgtaacaaaacaaaagcccggaaaccgggctttcgtctcttgccgcttatggctctgcacccggctccatcaccaacaggtcgcgcacgcgcttcactcggttgcggatcgacactgccagcccaacaaagccggttgccgccgccgccaggatcgcgccgatgatgccggccacaccggccatcgcccaccaggtcgccgccttccggttccattcctgctggtactgcttcgcaatgctggacctcggctcaccataggctgaccgctcgatggcgtatgccgcttctccccttggcgtaaaacccagcgccgcaggcggcattgccatgctgcccgccgctttcccgaccacgacgcgcgcaccaggcttgcggtccagaccttcggccacggcgagctgcgcaaggacataatcagccgccgacttggctccacgcgcctcgatcagctcttgcactcgcgcgaaatccttggcctccacggccgccatgaatcgcgcacgcggcgaaggctccgcagggccggcgtcgtgatcgccgccgagaatgcccttcaccaagttcgacgacacgaaaatcatgctgacggctatcaccatcatgcagacggatcgcacgaacccgctgaattgaacacgagcacggcacccgcgaccactatgccaagaatgcccaaggtaaaaattgccggccccgccatgaagtccgtgaatgccccgacggccgaagtgaagggcaggccgccacccaggccgccgccctcactgcccggcacctggtcgctgaatgtcgatgccagcacctgcggcacgtcaatgcttccgggcgtcgcgctcgggctgatcgcccatcccgttactgccccgatcccggcaatggcaaggactgccagcgctgccatttttggggtgaggccgttcgcggccgaggggcgcagcccctggggggatgggaggcccgcgttagcgggccgggagggttcgagaagggggggcaccccccttcggcgtgcgcggtcacgcgcacagggcgcagccctggttaaaaacaaggtttataaatattggtttaaaagcaggttaaaagacaggttagcggtggccgaaaaacgggcggaaacccttgcaaatgctggattttctgcctgtggacagcccctcaaatgtcaataggtgcgcccctcatctgtcagcactctgcccctcaagtgtcaaggatcgcgcccctcatctgtcagtagtcgcgcccctcaagtgtcaataccgcagggcacttatccccaggcttgtccacatcatctgtgggaaactcgcgtaaaatcaggcgttttcgccgatttgcgaggctggccagctccacgtcgccggccgaaatcgagcctgcccctcatctgtcaacgccgcgccgggtgagtcggcccctcaagtgtcaacgtccgcccctcatctgtcagtgagggccaagttttccgcgaggtatccacaacgccggcggccgcggtgtctcgcacacggcttcgacggcgtttctggcgcgtttgcagggccatagacggccgccagcccagcggcgagggcaaccagcccggtgagcgtcggaaaggcgctggaagccccgtagcgacgcggagaggggcgagacaagccaagggcgcaggctcgatgcgcagcacgacatagccggttctcgcaaggacgagaatttccctgcggtgcccctcaagtgtcaatgaaagtttccaacgcgagccattcgcgagagccttgagtccacgctagatgagagctttgttgtaggtggaccagttggtgattttgaacttttgctttgccacggaacggtctgcgttgtcgggaagatgcgtgatctgatccttcaactcagcaaaagttcgatttattcaacaaagccacgttgtgtctcaaaatctctgatgttacattgcacaagataaaaatatatcatcatgaacaataaaactgtctgcttacataaacagtaatacaaggggtgttatgagccatattcaacgggaaacgtcttgctcgactctagagctcgttcctcgaggaacggtacctgcggggaagcttacaataatgtgtgttgttaagtcttgttgcctgtcatcgtctgactgactttcgtcataaatcccggcctccgtaacccagctttgggcaagctcacggatttgatccggcggaacgggaatatcgagatgccgggctgaacgctgcagttccagctttccctttcgggacaggtactccagctgattgattatctgctgaagggtcttggttccacctcctggcacaatgcgaatgattacttgagcgcgatcgggcatccaattttctcccgtcaggtgcgtggtcaagtgctacaaggcacctttcagtaacgagcgaccgtcgatccgtcgccgggatacggacaaaatggagcgcagtagtccatcgagggcggcgaaagcctcgccaaaagcaatacgttcatctcgcacagcctccagatccgatcgagggtcttcggcgtaggcagatagaagcatggatacattgcttgagagtattccgatggactgaagtatggcttccatcttttctcgtgtgtctgcatctatttcgagaaagcccccgatgcggcgcaccgcaacgcgaattgccatactatccgaaagtcccagcaggcgcgcttgataggaaaaggtttcatactcggccgatcgcagacgggcactcacgaccttgaacccttcaactttcagggatcgatgctggttgatggtagtctcactcgacgtggctctggtgtgttttgacatagcttcctccaaagaaagcggaaggtctggatactccagcacgaaatgtgcccgggtagacggatggaagtctagccctgctcaatatgaaatcaacagtacatttacagtcaatactgaatatacttgctacatttgcaattgtcttataacgaatgtgaaataaaaatagtgtaacaacgcttttactcatcgataatcacaaaaacatttatacgaacaaaaatacaaatgcactccggtttcacaggataggcgggatcagaatatgcaacttttgacgttttgttctttcaaagggggtgctggcaaaaccaccgcactcatgggcctttgcgctgctttggcaaatgacggtaaacgagtggccctctttgatgccgacgaaaaccggcctctgacgcgatggagagaaaacgccttacaaagcagtactgggatcctcgctgtgaagtctattccgccgacgaaatgccccttcttgaagcagcctatgaaaatgccgagctcgaaggatttgattatgcgttggccgatacgcgtggcggctcgagcgagctcaacaacacaatcatcgctagctcaaacctgcttctgatccccaccatgctaacgccgctcgacatcgatgaggcactatctacctaccgctacgtcatcgagctgctgttgagtgaaaatttggcaattcctacagctgttttgcgccaacgcgtcccggtcggccgattgacaacatcgcaacgcaggatgtcagagacgctagagagccttccagttgtaccgtctcccatgcatgaaagagatgcatttgccgcgatgaaagaacgcggcatgttgcatcttacattactaaacacgggaactgatccgacgatgcgcctcatagagaggaatcttcggattgcgatggaggaagtcgtggtcatttcgaaactgatcagcaaaatcttggaggcttgaagatggcaattcgcaagcccgcattgtcggtcggcgaagcacggcggcttgctggtgctcgacccgagatccaccatcccaacccgacacttgttccccagaagctggacctccagcacttgcctgaaaaagccgacgagaaagaccagcaacgtgagcctctcgtcgccgatcacatttacagtcccgatcgacaacttaagctaactgtggatgcccttagtccacctccgtccccgaaaaagctccaggtttttctttcagcgcgaccgcccgcgcctcaagtgtcgaaaacatatgacaacctcgttcggcaatacagtccctcgaagtcgctacaaatgattttaaggcgcgcgttggacgatttcgaaagcatgctggcagatggatcatttcgcgtggccccgaaaagttatccgatcccttcaactacagaaaaatccgttctcgttcagacctcacgcatgttcccggttgcgttgctcgaggtcgctcgaagtcattttgatccgttggggttggagaccgctcgagctttcggccacaagctggctaccgccgcgctcgcgtcattctttgctggagagaagccatcgagcaattggtgaagagggacctatcggaacccctcaccaaatattgagtgtaggtttgaggccgctggccgcgtcctcagtcaccttttgagccagataattaagagccaaatgcaattggctcaggctgccatcgtccccccgtgcgaaacctgcacgtccgcgtcaaagaaataaccggcacctcttgctgtttttatcagttgagggcttgacggatccgcctcaagtttgcggcgcagccgcaaaatgagaacatctatactcctgtcgtaaacctcctcgtcgcgtactcgactggcaatgagaagttgctcgcgcgatagaacgtcgcggggtttctctaaaaacgcgaggagaagattgaactcacctgccgtaagtttcacctcaccgccagcttcggacatcaagcgacgttgcctgagattaagtgtccagtcagtaaaacaaaaagaccgtcggtctttggagcggacaacgttggggcgcacgcgcaaggcaacccgaatgcgtgcaagaaactctctcgtactaaacggcttagcgataaaatcacttgctcctagctcgagtgcaacaactttatccgtctcctcaaggcggtcgccactgataattatgattggaatatcagactttgccgccagatttcgaacgatctcaagcccatcttcacgacctaaatttagatcaacaaccacgacatcgaccgtcgcggaagagagtactctagtgaactgggtgctgtcggctaccgcggtcactttgaaggcgtggatcgtaaggtattcgataataagatgccgcatagcgacatcgtcatcgataagaagaacgtgtttcaacggctcacctttcaatctaaaatctgaacccttgttcacagcgcttgagaaattttcacgtgaaggatgtacaatcatctccagctaaatgggcagttcgtcagaattgcggctgaccgcggatgacgaaaatgcgaaccaagtatttcaattttatgacaaaagttctcaatcgttgttacaagtgaaacgcttcgaggttacagctactattgattaaggagatcgcctatggtctcgccccggcgtcgtgcgtccgccgcgagccagatctcgcctacttcataaacgtcctcataggcacggaatggaatgatgacatcgatcgccgtagagagcatgtcaatcagtgtgcgatcttccaagctagcaccttgggcgctacttttgacaagggaaaacagtttcttgaatccttggattggattcgcgccgtgtattgttgaaatcgatcccggatgtcccgagacgacttcactcagataagcccatgctgcatcgtcgcgcatctcgccaagcaatatccggtccggccgcatacgcagacttgcttggagcaagtgctcggcgctcacagcacccagcccagcaccgttcttggagtagagtagtctaacatgattatcgtgtggaatgacgagttcgagcgtatcttctatggtgattagcctttcctggggggggatggcgctgatcaaggtcttgctcattgttgtcttgccgcttccggtagggccacatagcaacatcgtcagtcggctgacgacgcatgcgtgcagaaacgcttccaaatccccgttgtcaaaatgctgaaggatagcttcatcatcctgattttggcgtttccttcgtgtctgccactggttccacctcgaagcatcataacgggaggagacttctttaagaccagaaacacgcgagcttggccgtcgaatggtcaagctgacggtgcccgagggaacggtcggcggcagacagatttgtagtcgttcaccaccaggaagttcagtggcgcagagggggttacgtggtccgacatcctgctttctcagcgcgcccgctaaaatagcgatatcttcaagatcatcataagagacgggcaaaggcatcttggtaaaaatgccggcttggcgcacaaatgcctctccaggtcgattgatcgcaatttcttcagtcttcgggtcatcgagccattccaaaatcggcttcagaagaaagcgtagttgcggatccacttccatttacaatgtatcctatctctaagcggaaatttgaattcattaagagcggcggttcctcccccgcgtggcgccgccagtcaggcggagctggtaaacaccaaagaaatcgaggtcccgtgctacgaaaatggaaacggtgtcaccctgattcttcttcagggttggcggtatgttgatggttgccttaagggctgtctcagttgtctgctcaccgttattttgaaagctgttgaagctcatcccgccacccgagctgccggcgtaggtgctagctgcctggaaggcgccttgaacaacactcaagagcatagctccgctaaaacgctgccagaagtggctgtcgaccgagcccggcaatcctgagcgaccgagttcgtccgcgcttggcgatgttaacgagatcatcgcatggtcaggtgtctcggcgcgatcccacaacacaaaaacgcgcccatctccctgttgcaagccacgctgtatttcgccaacaacggtggtgccacgatcaagaagcacgatattgttcgttgttccacgaatatcctgaggcaagacacactttacatagcctgccaaatttgtgtcgattgcggtttgcaagatgcacggaattattgtcccttgcgttaccataaaatcggggtgcggcaagagcgtggcgctgctgggctgcagctcggtgggtttcatacgtatcgacaaatcgttctcgccggacacttcgccattcggcaaggagttgtcgtcacgcttgccttcttgtcttcggcccgtgtcgccctgaatggcgcgtttgctgaccccttgatcgccgctgctatatgcaaaaatcggtgtttcttccggccgtggctcatgccgctccggttcgcccctcggcggtagaggagcagcaggctgaacagcctcttgaaccgctggaggatccggcggcacctcaatcggagctggatgaaatggcttggtgtttgttgcgatcaaagttgacggcgatgcgttctcattcaccttcttttggcgcccacctagccaaatgaggcttaatgataacgcgagaacgacacctccgacgatcaatttctgagaccccgaaagacgccggcgatgtttgtcggagaccagggatccagatgcatcaacctcatgtgccgcttgctgactatcgttattcatcccttcgcccccttcaggacgcgtttcacatcgggcctcaccgtgcccgtttgcggcctttggccaacgggatcgtaagcggtgttccagatacatagtactgtgtggccatccctcagacgccaacctcgggaaaccgaagaaatctcgacatcgctccctttaactgaatagttggcaacagcttccttgccatcaggattgatggtgtagatggagggtatgcgtacattgcccggaaagtggaataccgtcgtaaatccattgtcgaagacttcgagtggcaacagcgaacgatcgccttgggcgacgtagtgccaattactgtccgccgcaccaagggctgtgacaggctgatccaataaattctcagctttccgttgatattgtgcttccgcgtgtagtctgtccacaacagccttctgttgtgcctcccttcgccgagccgccgcatcgtcggcggggtaggcgaattggacgctgtaatagagatcgggctgctctttatcgaggtgggacagagtcttggaacttatactgaaaacataacggcgcatcccggagtcgcttgcggttagcacgattactggctgaggcgtgaggacctggcttgccttgaaaaatagataatttccccgcggtagggctgctagatctttgctatttgaaacggcaaccgctgtcaccgtttcgttcgtggcgaatgttacgaccaaagtagctccaaccgccgtcgagaggcgcaccacttgatcgggattgtaagccaaataacgcatgcgcggatctagcttgcccgccattggagtgtcttcagcctccgcaccagtcgcagcggcaaataaacatgctaaaatgaaaagtgcttttctgatcatggttcgctgtggcctacgtttgaaacggtatcttccgatgtctgataggaggtgacaaccagacctgccgggttggttagtctcaatctgccgggcaagctggtcaccttttcgtagcgaactgtcgcggtccacgtactcaccacaggcattttgccgtcaacgacgagggtccttttatagcgaatttgctgcgtgcttggagttacatcatttgaagcgatgtgctcgacctccaccctgccgcgtttgccaagaatgacttgaggcgaactgggattgggatagttgaagaattgctggtaatcctggcgcactgttggggcactgaagttcgataccaggtcgtaggcgtactgagcggtgtcggcatcataactctcgcgcaggcgaacgtactcccacaatgaggcgttaacgacggcctcctcttgagttgcaggcaatcgcgagacagacacctcgctgtcaacggtgccgtccggccgtatccatagatatacgggcacaagcctgctcaacggcaccattgtggctatagcgaacgcttgagcaacatttcccaaaatcgcgatagctgcgacagctgcaatgagtttggagagacgtcgcgccgatttcgctcgcgcggtttgaaaggcttctacttccttatagtgctcggcaaggctttcgcgcgccactagcatggcatattcaggccccgtcatagcgtccacccgaattgccgagctgaagatctgacggagtaggctgccatcgccccacattcagcgggaagatcgggcctttgcagctcgctaatgtgtcgtttgtctggcagccgctcaaagcgacaactaggcacagcaggcaatacttcatagaattctccattgaggcgaatttttgcgcgacctagcctcgctcaacctgagcgaagcgacggtacaagctgctggcagattgggttgcgccgctccagtaactgcctccaatgttgccggcgatcgccggcaaagcgacaatgagcgcatcccctgtcagaaaaaacatatcgagttcgtaaagaccaatgatcttggccgcggtcgtaccggcgaaggtgattacaccaagcataagggtgagcgcagtcgcttcggttaggatgacgatcgttgccacgaggtttaagaggagaagcaagagaccgtaggtgataagttgcccgatccacttagctgcgatgtcccgcgtgcgatcaaaaatatatccgacgaggatcagaggcccgatcgcgagaagcactttcgtgagaattccaacggcgtcgtaaactccgaaggcagaccagagcgtgccgtaaaggacccactgtgccccttggaaagcaaggatgtcctggtcgttcatcggaccgatttcggatgcgattttctgaaaaacggcctgggtcacggcgaacattgtatccaactgtgccggaacagtctgcagaggcaagccggttacactaaactgctgaacaaagtttgggaccgtcttttcgaagatggaaaccacatagtcttggtagttagcctgcccaacaattagagcaacaacgatggtgaccgtgatcacccgagtgataccgctacgggtatcgacttcgccgcgtatgactaaaataccctgaacaataatccaaagagtgacacaggcgatcaatggcgcactcaccgcctcctggatagtctcaagcatcgagtccaagcctgtcgtgaaggctacatcgaagatcgtatgaatggccgtaaacggcgccggaatcgtgaaattcatcgattggacctgaacttgactggtttgtcgcataatgttggataaaatgagctcgcattcggcgaggatgcgggcggatgaacaaatcgcccagccttaggggagggcaccaaagatgacagcggtcttttgatgctccttgcgttgagcggccgcctcttccgcctcgtgaaggccggcctgcgcggtagtcatcgttaataggcttgtcgcctgtacattttgaatcattgcgtcatggatctgcttgagaagcaaaccattggtcacggttgcctgcatgatattgcgagatcgggaaagctgagcagacgtatcagcattcgccgtcaagcgtttgtccatcgtttccagattgtcagccgcaatgccagcgctgtttgcggaaccggtgatctgcgatcgcaacaggtccgcttcagcatcactacccacgactgcacgatctgtatcgctggtgatcgcacgtgccgtggtcgacattggcattcgcggcgaaaacatttcattgtctaggtccttcgtcgaaggatactgatttttctggttgagcgaagtcagtagtccagtaacgccgtaggccgacgtcaacatcgtaaccatcgctatagtctgagtgagattctccgcagtcgcgagcgcagtcgcgagcgtctcagcctccgttgccgggtcgctaacaacaaactgcgcccgcgcgggctgaatatatagaaagctgcaggtcaaaactgttgcaataagttgcgtcgtcttcatcgtttcctaccttatcaatcttctgcctcgtggtgacgggccatgaattcgctgagccagccagatgagttgccttcttgtgcctcgcgtagtcgagttgcaaagcgcaccgtgttggcacgccccgaaagcacggcgacatattcacgcatatcccgcagatcaaattcgcagatgacgcttccactttctcgtttaagaagaaacttacggctgccgaccgtcatgtcttcacggatcgcctgaaattccttttcggtacatttcagtccatcgacataagccgatcgatctgcggttggtgatggatagaaaatcttcgtcatacattgcgcaaccaagctggctcctagcggcgattccagaacatgctctggttgctgcgttgccagtattagcatcccgttgttttttcgaacggtcaggaggaatttgtcgacgacagtcgaaaatttagggtttaacaaataggcgcgaaactcatcgcagctcatcacaaaacggcggccgtcgatcatggctccaatccgatgcaggagatatgctgcagcgggagcgcatacttcctcgtattcgagaagatgcgtcatgtcgaagccggtaatcgacggatctaactttacttcgtcaacttcgccgtcaaatgcccagccaagcgcatggccccggcaccagcgttggagccgcgctcctgcgccttcggcgggcccatgcaacaaaaattcacgtaaccccgcgattgaacgcatttgtggatcaaacgagagctgacgatggataccacggaccagacggcggttctcttccggagaaatcccaccccgaccatcactctcgatgagagccacgatccattcgcgcagaaaatcgtgtgaggctgctgtgttttctaggccacgcaacggcgccaacccgctgggtgtgcctctgtgaagtgccaaatatgttcctcctgtggcgcgaaccagcaattcgccaccccggtccttgtcaaagaacacgaccgtacctgcacggtcgaccatgctctgttcgagcatggctagaacaaacatcatgagcgtcgtcttacccctcccgataggcccgaatattgccgtcatgccaacatcgtgctcatgcgggatatagtcgaaaggcgttccgccattggtacgaaatcgggcaatcgcgttgccccagtggcctgagctggcgccctctggaaagttttcgaaagagacaaaccctgcgaaattgcgtgaagtgattgcgccagggcgtgtgcgccacttaaaattccccggcaattgggaccaataggccgcttccataccaataccttcttggacaaccacggcacctgcatccgccattcgtgtccgagcccgcgcgcccctgtccccaagactattgagatcgtctgcatagacgcaaaggctcaaatgatgtgagcccataacgaattcgttgctcgcaagtgcgtcctcagcctcggataatttgccgatttgagtcacggctttatcgccggaactcagcatctggctcgatttgaggctaagtttcgcgtgcgcttgcgggcgagtcaggaacgaaaaactctgcgtgagaacaagtggaaaatcgagggatagcagcgcgttgagcatgcccggccgtgtttttgcagggtattcgcgaaacgaatagatggatccaacgtaactgtcttttggcgttctgatctcgagtcctcgcttgccgcaaatgactctgtcggtataaatcgaagcgccgagtgagccgctgacgaccggaaccggtgtgaaccgaccagtcatgatcaaccgtagcgcttcgccaatttcggtgaagagcacaccctgcttctcgcggatgccaagacgatgcaggccatacgctttaagagagccagcgacaacatgccaaagatcttccatgttcctgatctggcccgtgagatcgttttccctttttccgcttagcttggtgaacctcctctttaccttccctaaagccgcctgtgggtagacaatcaacgtaaggaagtgttcattgcggaggagttggccggagagcacgcgctgttcaaaagcttcgttcaggctagcggcgaaaacactacggaagtgtcgcggcgccgatgatggcacgtcggcatgacgtacgaggtgagcatatattgacacatgatcatcagcgatattgcgcaacagcgtgttgaacgcacgacaacgcgcattgcgcatttcagtttcctcaagctcgaatgcaacgccatcaattctcgcaatggtcatgatcgatccgtcttcaagaaggacgatatggtcgctgaggtggccaatataagggagatagatctcaccggatctttcggtcgttccactcgcgccgagcatcacaccattcctctccctcgtgggggaaccctaattggatttgggctaacagtagcgcccccccaaactgcactatcaatgcttcttcccgcggtccgcaaaaatagcaggacgacgctcgccgcattgtagtctcgctccacgatgagccgggctgcaaaccataacggcacgagaacgacttcgtagagcgggttctgaacgataacgatgacaaagccggcgaacatcatgaataaccctgccaatgtcagtggcaccccaagaaacaatgcgggccgtgtggctgcgaggtaaagggtcgattcttccaaacgatcagccatcaactaccgccagtgagcgtttggccgaggaagctcgccccaaacatgataacaatgccgccgacgacgccggcaaccagcccaagcgaagcccgcccgaacatccaggagatcccgatagcgacaatgccgagaacagcgagtgactggccgaacggaccaaggataaacgtgcatatattgttaaccattgtggcggggtcagtgccgccacccgcagattgcgctgcggcgggtccggatgaggaaatgctccatgcaattgcaccgcacaagcttggggcgcagctcgatatcacgcgcatcatcgcattcgagagcgagaggcgatttagatgtaaacggtatctctcaaagcatcgcatcaatgcgcacctccttagtataagtcgaataagacttgattgtcgtctgcggatttgccgttgtcctggtgtggcggtggcggagcgattaaaccgccagcgccatcctcctgcgagcggcgctgatatgacccccaaacatcccacgtctcttcggattttagcgcctcgtgatcgtcttttggaggctcgattaacgcgggcaccagcgattgagcagctgtttcaacttttcgcacgtagccgtttgcaaaaccgccgatgaaattaccggtgttgtaagcggagatcgcccgacgaagcgcaaattgcttctcgtcaatcgtttcgccgcctgcataacgacttttcagcatgtttgcagcggcagataatgatgtgcacgcctggagcgcaccgtcaggtgtcagaccgagcatagaaaaatttcgagagtttatttgcatgaggccaacatccagcgaatgccgtgcatcgagacggtgcctgacgacttgggttgcttggctgtgatcttgccagtgaagcgtttcgccggtcgtgttgtcatgaatcgctaaaggatcaaagcgactctccaccttagctatcgccgcaagcgtagatgtcgcaactgatggggcacacttgcgagcaacatggtcaaactcagcagatgagagtggcgtggcaaggctcgacgaacagaaggagaccatcaaggcaagagaaagcgaccccgatctcttaagcataccttatctccttagctcgcaactaacaccgcctctcccgttggaagaagtgcgttgttttatgttgaagattatcgggagggtcggttactcgaaaattttcaattgcttctttatgatttcaattgaagcgagaaacctcgcccggcgtcttggaacgcaacatggaccgagaaccgcgcatccatgactaagcaaccggatcgacctattcaggccgcagttggtcaggtcaggctcagaacgaaaatgctcggcgaggttacgctgtctgtaaacccattcgatgaacgggaagcttccttccgattgctcttggcaggaatattggcccatgcctgcttgcgctttgcaaatgctcttatcgcgttggtatcatatgccttgtccgccagcagaaacgcactctaagcgattatttgtaaaaatgtttcggtcatgcggcggtcatgggcttgacccgctgtcagcgcaagacggatcggtcaaccgtcggcatcgacaacagcgtgaatcttggtggtcaaaccgccacgggaacgtcccatacagccatcgtcttgatcccgctgtttcccgtcgccgcatgttggtggacgcggacacaggaactgtcaatcatgacgacattctatcgaaagccttggaaatcacactcagaatatgatcccagacgtctgcctcacgccatcgtacaaagcgattgtagcaggttgtacaggaaccgtatcgatcaggaacgtctgcccagggcgggcccgtccggaagcgccacaagatgacattgatcacccgcgtcaacgcgcggcacgcgacgcggcttatttgggaacaaaggactgaacaacagtccattcgaaatcggtgacatcaaagcggggacgggttatcagtggcctccaagtcaagcctcaatgaatcaaaatcagaccgatttgcaaacctgatttatgagtgtgcggcctaaatgatgaaatcgtccttctagatcgcctccgtggtgtagcaacacctcgcagtatcgccgtgctgaccttggccagggaattgactggcaagggtgctttcacatgaccgctcttttggccgcgatagatgatttcgttgctgctttgggcacgtagaaggagagaagtcatatcggagaaattcctcctggcgcgagagcctgctctatcgcgacggcatcccactgtcgggaacagaccggatcattcacgaggcgaaagtcgtcaacacatgcgttataggcatcttcccttgaaggatgatcttgttgctgccaatctggaggtgcggcagccgcaggcagatgcgatctcagcgcaacttgcggcaaaacatctcactcacctgaaaaccactagcgagtctcgcgatcagacgaaggccttttacttaacgacacaatatccgatgtctgcatcacaggcgtcgctatcccagtcaatactaaagcggtgcaggaactaaagattactgatgacttaggcgtgccacgaggcctgagacgacgcgcgtagacagttttttgaaatcattatcaaagtgatggcctccgctgaagcctatcacctctgcgccggtctgtcggagagatgggcaagcattattacggtcttcgcgcccgtacatgcattggacgattgcagggtcaatggatctgagatcatccagaggattgccgcccttaccttccgtttcgagttggagccagcccctaaatgagacgacatagtcgacttgatgtgacaatgccaagagagagatttgcttaacccgatttttttgctcaagcgtaagcctattgaagcttgccggcatgacgtccgcgccgaaagaatatcctacaagtaaaacattctgcacaccgaaatgcttggtgtagacatcgattatgtgaccaagatccttagcagtttcgcttggggaccgctccgaccagaaataccgaagtgaactgacgccaatgacaggaatcccttccgtctgcagataggtaccatcgatagatctgctgcctcgcgcgtttcggtgatgacggtgaaaacctctgacacatgcagctcccggagacggtcacagcttgtctgtaagcggatgccgggagcagacaagcccgtcagggcgcgtcagcgggtgttggcgggtgtcggggcgcagccatgacccagtcacgtagcgatagcggagtgtatactggcttaactatgcggcatcagagcagattgtactgagagtgcaccatatgcggtgtgaaataccgcacagatgcgtaaggagaaaataccgcatcaggcgctcttccgcttcctcgctcactgactcgctgcgctcggtcgttcggctgcggcgagcggtatcagctcactcaaaggcggtaatacggttatccacagaatcaggggataacgcaggaaagaacatgtgagcaaaaggccagcaaaaggccaggaaccgtaaaaaggccgcgttgctggcgtttttccataggctccgcccccctgacgagcatcacaaaaatcgacgctcaagtcagaggtggcgaaacccgacaggactataaagataccaggcgtttccccctggaagctccctcgtgcgctctcctgttccgaccctgccgcttaccggatacctgtccgcctttctcccttcgggaagcgtggcgctttctcatagctcacgctgtaggtatctcagttcggtgtaggtcgttcgctccaagctgggctgtgtgcacgaaccccccgttcagcccgaccgctgcgccttatccggtaactatcgtcttgagtccaacccggtaagacacgacttatcgccactggcagcagccactggtaacaggattagcagagcgaggtatgtaggcggtgctacagagttcttgaagtggtggcctaactacggctacactagaaggacagtatttggtatctgcgctctgctgaagccagttaccttcggaaaaagagttggtagctcttgatccggcaaacaaaccaccgctggtagcggtggtttttttgtttgcaagcagcagattacgcgcagaaaaaaaggatctcaagaagatcctttgatcttttctacggggtctgacgctcagtggaacgaaaactcacgttaagggattttggtcatgagattatcaaaaaggatcttcacctagatccttttaaattaaaaatgaagttttaaatcaatctaaagtatatatgagtaaacttggtctgacagttaccaatgcttaatcagtgaggcacctatctcagcgatctgtctatttcgttcatccatagttgcctgactccccgtcgtgtagataactacgatacgggagggcttaccatctggccccagtgctgcaatgataccgcgagacccacgctcaccggctccagatttatcagcaataaaccagccagccggaagggccgagcgcagaagtggtcctgcaactttatccgcctccatccagtctattaattgttgccgggaagctagagtaagtagttcgccagttaatagtttgcgcaacgttgttgccattgctgcagggggggggggggggggggacttccattgttcattccacggacaaaaacagagaaaggaaacgacagaggccaaaaagcctcgctttcagcacctgtcgtttcctttcttttcagagggtattttaaataaaaacattaagttatgacgaagaagaacggaaacgccttaaaccggaaaattttcataaatagcgaaaacccgcgaggtcgccgccccgtagtcggatcaccggaaaggacccgtaaagtgataatgattatcatctacatatcacaacgtgcgtggaggccatcaaaccacgtcaaataatcaattatgacgcaggtatcgtattaattgatctgcatcaacttaacgtaaaaacaacttcagacaatacaaatcagcgacactgaatacggggcaacctcatgtcccccccccccccccccctgcaggcatcgtggtgtcacgctcgtcgtttggtatggcttcattcagctccggttcccaacgatcaaggcgagttacatgatcccccatgttgtgcaaaaaagcggttagctccttcggtcctccgatcgttgtcagaagtaagttggccgcagtgttatcactcatggttatggcagcactgcataattctcttactgtcatgccatccgtaagatgcttttctgtgactggtgagtactcaaccaagtcattctgagaatagtgtatgcggcgaccgagttgctcttgcccggcgtcaacacgggataataccgcgccacatagcagaactttaaaagtgctcatcattggaaaacgttcttcggggcgaaaactctcaaggatcttaccgctgttgagatccagttcgatgtaacccactcgtgcacccaactgatcttcagcatcttttactttcaccagcgtttctgggtgagcaaaaacaggaaggcaaaatgccgcaaaaaagggaataagggcgacacggaaatgttgaatactcatactcttcctttttcaatattattgaagcatttatcagggttattgtctcatgagcggatacatatttgaatgtatttagaaaaataaacaaataggggttccgcgcacatttccccgaaaagtgccacctgacgtctaagaaaccattattatcatgacattaacctataaaaataggcgtatcacgaggccctttcgtcttcaagaattggtcgacgatcttgctgcgttcggatattttcgtggagttcccgccacagacccggattgaaggcgagatccagcaactcgcgccagatcatcctgtgacggaactttggcgcgtgatgactggccaggacgtcggccgaaagagcgacaagcagatcacgcttttcgacagcgtcggatttgcgatcgaggatttttcggcgctgcgctacgtccgcgaccgcgttgagggatcaagccacagcagcccactcgaccttctagccgacccagacgagccaagggatctttttggaatgctgctccgtcgtcaggctttccgacgtttgggtggttgaacagaagtcattatcgtacggaatgccaagcactcccgaggggaaccctgtggttggcatgcacatacaaatggacgaacggataaaccttttcacgcccttttaaatatccgttattctaataaacgctcttttctcttaggtttacccgccaatatatcctgtcaaacactgatagtttaaactgaaggcgggaaacgacaatctgatcatgagcggagaattaagggagtcacgttatgacccccgccgatgacgcgggacaagccgttttacgtttggaactgacagaaccgcaacgttgaaggagccactcagcaagctggtacgattgtaatacgactcactatagggcgaattgagcgctgtttaaacgctcttcaactggaagagcggttacccggaccgaagcttgcatgcctgcag

SEQ ID NO: 7 - DNA, 36909 bp, artificial sequence
  vector
tctagagctcgttcctcgaggcctcgaggcctcgaggaacggtacctgcggggaagcttacaataatgtgtgttgttaagtcttgttgcctgtcatcgtctgactgactttcgtcataaatcccggcctccgtaacccagctttgggcaagctcacggatttgatccggcggaacgggaatatcgagatgccgggctgaacgctgcagttccagctttccctttcgggacaggtactccagctgattgattatctgctgaagggtcttggttccacctcctggcacaatgcgaatgattacttgagcgcgatcgggcatccaattttctcccgtcaggtgcgtggtcaagtgctacaaggcacctttcagtaacgagcgaccgtcgatccgtcgccgggatacggacaaaatggagcgcagtagtccatcgagggcggcgaaagcctcgccaaaagcaatacgttcatctcgcacagcctccagatccgatcgagggtcttcggcgtaggcagatagaagcatggatacattgcttgagagtattccgatggactgaagtatggcttccatcttttctcgtgtgtctgcatctatttcgagaaagcccccgatgcggcgcaccgcaacgcgaattgccatactatccgaaagtcccagcaggcgcgcttgataggaaaaggtttcatactcggccgatcgcagacgggcactcacgaccttgaacccttcaactttcagggatcgatgctggttgatggtagtctcactcgacgtggctctggtgtgttttgacatagcttcctccaaagaaagcggaaggtctggatactccagcacgaaatgtgcccgggtagacggatggaagtctagccctgctcaatatgaaatcaacagtacatttacagtcaatactgaatatacttgctacatttgcaattgtcttataacgaatgtgaaataaaaatagtgtaacaacgcttttactcatcgataatcacaaaaacatttatacgaacaaaaatacaaatgcactccggtttcacaggataggcgggatcagaatatgcaacttttgacgttttgttctttcaaagggggtgctggcaaaaccaccgcactcatgggcctttgcgctgctttggcaaatgacggtaaacgagtggccctctttgatgccgacgaaaaccggcctctgacgcgatggagagaaaacgccttacaaagcagtactgggatcctcgctgtgaagtctattccgccgacgaaatgccccttcttgaagcagcctatgaaaatgccgagctcgaaggatttgattatgcgttggccgatacgcgtggcggctcgagcgagctcaacaacacaatcatcgctagctcaaacctgcttctgatccccaccatgctaacgccgctcgacatcgatgaggcactatctacctaccgctacgtcatcgagctgctgttgagtgaaaatttggcaattcctacagctgttttgcgccaacgcgtcccggtcggccgattgacaacatcgcaacgcaggatgtcagagacgctagagagccttccagttgtaccgtctcccatgcatgaaagagatgcatttgccgcgatgaaagaacgcggcatgttgcatcttacattactaaacacgggaactgatccgacgatgcgcctcatagagaggaatcttcggattgcgatggaggaagtcgtggtcatttcgaaactgatcagcaaaatcttggaggcttgaagatggcaattcgcaagcccgcattgtcggtcggcgaagcacggcggcttgctggtgctcgacccgagatccaccatcccaacccgacacttgttccccagaagctggacctccagcacttgcctgaaaaagccgacgagaaagaccagcaacgtgagcctctcgtcgccgatcacatttacagtcccgatcgacaacttaagctaactgtggatgcccttagtccacctccgtccccgaaaaagctccaggtttttctttcagcgcgaccgcccgcgcctcaagtgtcgaaaacatatgacaacctcgttcggcaatacagtccctcgaagtcgctacaaatgattttaaggcgcgcgttggacgatttcgaaagcatgctggcagatggatcatttcgcgtggccccgaaaagttatccgatcccttcaactacagaaaaatccgttctcgttcagacctcacgcatgttcccggttgcgttgctcgaggtcgctcgaagtcattttgatccgttggggttggagaccgctcgagctttcggccacaagctggctaccgccgcgctcgcgtcattctttgctggagagaagccatcgagcaattggtgaagagggacctatcggaacccctcaccaaatattgagtgtaggtttgaggccgctggccgcgtcctcagtcaccttttgagccagataattaagagccaaatgcaattggctcaggctgccatcgtccccccgtgcgaaacctgcacgtccgcgtcaaagaaataaccggcacctcttgctgtttttatcagttgagggcttgacggatccgcctcaagtttgcggcgcagccgcaaaatgagaacatctatactcctgtcgtaaacctcctcgtcgcgtactcgactggcaatgagaagttgctcgcgcgatagaacgtcgcggggtttctctaaaaacgcgaggagaagattgaactcacctgccgtaagtttcacctcaccgccagcttcggacatcaagcgacgttgcctgagattaagtgtccagtcagtaaaacaaaaagaccgtcggtctttggagcggacaacgttggggcgcacgcgcaaggcaacccgaatgcgtgcaagaaactctctcgtactaaacggcttagcgataaaatcacttgctcctagctcgagtgcaacaactttatccgtctcctcaaggcggtcgccactgataattatgattggaatatcagactttgccgccagatttcgaacgatctcaagcccatcttcacgacctaaatttagatcaacaaccacgacatcgaccgtcgcggaagagagtactctagtgaactgggtgctgtcggctaccgcggtcactttgaaggcgtggatcgtaaggtattcgataataagatgccgcatagcgacatcgtcatcgataagaagaacgtgtttcaacggctcacctttcaatctaaaatctgaacccttgttcacagcgcttgagaaattttcacgtgaaggatgtacaatcatctccagctaaatgggcagttcgtcagaattgcggctgaccgcggatgacgaaaatgcgaaccaagtatttcaattttatgacaaaagttctcaatcgttgttacaagtgaaacgcttcgaggttacagctactattgattaaggagatcgcctatggtctcgccccggcgtcgtgcgtccgccgcgagccagatctcgcctacttcataaacgtcctcataggcacggaatggaatgatgacatcgatcgccgtagagagcatgtcaatcagtgtgcgatcttccaagctagcaccttgggcgctacttttgacaagggaaaacagtttcttgaatccttggattggattcgcgccgtgtattgttgaaatcgatcccggatgtcccgagacgacttcactcagataagcccatgctgcatcgtcgcgcatctcgccaagcaatatccggtccggccgcatacgcagacttgcttggagcaagtgctcggcgctcacagcacccagcccagcaccgttcttggagtagagtagtctaacatgattatcgtgtggaatgacgagttcgagcgtatcttctatggtgattagcctttcctggggggggatggcgctgatcaaggtcttgctcattgttgtcttgccgcttccggtagggccacatagcaacatcgtcagtcggctgacgacgcatgcgtgcagaaacgcttccaaatccccgttgtcaaaatgctgaaggatagcttcatcatcctgattttggcgtttccttcgtgtctgccactggttccacctcgaagcatcataacgggaggagacttctttaagaccagaaacacgcgagcttggccgtcgaatggtcaagctgacggtgcccgagggaacggtcggcggcagacagatttgtagtcgttcaccaccaggaagttcagtggcgcagagggggttacgtggtccgacatcctgctttctcagcgcgcccgctaaaatagcgatatcttcaagatcatcataagagacgggcaaaggcatcttggtaaaaatgccggcttggcgcacaaatgcctctccaggtcgattgatcgcaatttcttcagtcttcgggtcatcgagccattccaaaatcggcttcagaagaaagcgtagttgcggatccacttccatttacaatgtatcctatctctaagcggaaatttgaattcattaagagcggcggttcctcccccgcgtggcgccgccagtcaggcggagctggtaaacaccaaagaaatcgaggtcccgtgctacgaaaatggaaacggtgtcaccctgattcttcttcagggttggcggtatgttgatggttgccttaagggctgtctcagttgtctgctcaccgttattttgaaagctgttgaagctcatcccgccacccgagctgccggcgtaggtgctagctgcctggaaggcgccttgaacaacactcaagagcatagctccgctaaaacgctgccagaagtggctgtcgaccgagcccggcaatcctgagcgaccgagttcgtccgcgcttggcgatgttaacgagatcatcgcatggtcaggtgtctcggcgcgatcccacaacacaaaaacgcgcccatctccctgttgcaagccacgctgtatttcgccaacaacggtggtgccacgatcaagaagcacgatattgttcgttgttccacgaatatcctgaggcaagacacactttacatagcctgccaaatttgtgtcgattgcggtttgcaagatgcacggaattattgtcccttgcgttaccataaaatcggggtgcggcaagagcgtggcgctgctgggctgcagctcggtgggtttcatacgtatcgacaaatcgttctcgccggacacttcgccattcggcaaggagttgtcgtcacgcttgccttcttgtcttcggcccgtgtcgccctgaatggcgcgtttgctgaccccttgatcgccgctgctatatgcaaaaatcggtgtttcttccggccgtggctcatgccgctccggttcgcccctcggcggtagaggagcagcaggctgaacagcctcttgaaccgctggaggatccggcggcacctcaatcggagctggatgaaatggcttggtgtttgttgcgatcaaagttgacggcgatgcgttctcattcaccttcttttggcgcccacctagccaaatgaggcttaatgataacgcgagaacgacacctccgacgatcaatttctgagaccccgaaagacgccggcgatgtttgtcggagaccagggatccagatgcatcaacctcatgtgccgcttgctgactatcgttattcatcccttcgcccccttcaggacgcgtttcacatcgggcctcaccgtgcccgtttgcggcctttggccaacgggatcgtaagcggtgttccagatacatagtactgtgtggccatccctcagacgccaacctcgggaaaccgaagaaatctcgacatcgctccctttaactgaatagttggcaacagcttccttgccatcaggattgatggtgtagatggagggtatgcgtacattgcccggaaagtggaataccgtcgtaaatccattgtcgaagacttcgagtggcaacagcgaacgatcgccttgggcgacgtagtgccaattactgtccgccgcaccaagggctgtgacaggctgatccaataaattctcagctttccgttgatattgtgcttccgcgtgtagtctgtccacaacagccttctgttgtgcctcccttcgccgagccgccgcatcgtcggcggggtaggcgaattggacgctgtaatagagatcgggctgctctttatcgaggtgggacagagtcttggaacttatactgaaaacataacggcgcatcccggagtcgcttgcggttagcacgattactggctgaggcgtgaggacctggcttgccttgaaaaatagataatttccccgcggtagggctgctagatctttgctatttgaaacggcaaccgctgtcaccgtttcgttcgtggcgaatgttacgaccaaagtagctccaaccgccgtcgagaggcgcaccacttgatcgggattgtaagccaaataacgcatgcgcggatctagcttgcccgccattggagtgtcttcagcctccgcaccagtcgcagcggcaaataaacatgctaaaatgaaaagtgcttttctgatcatggttcgctgtggcctacgtttgaaacggtatcttccgatgtctgataggaggtgacaaccagacctgccgggttggttagtctcaatctgccgggcaagctggtcaccttttcgtagcgaactgtcgcggtccacgtactcaccacaggcattttgccgtcaacgacgagggtccttttatagcgaatttgctgcgtgcttggagttacatcatttgaagcgatgtgctcgacctccaccctgccgcgtttgccaagaatgacttgaggcgaactgggattgggatagttgaagaattgctggtaatcctggcgcactgttggggcactgaagttcgataccaggtcgtaggcgtactgagcggtgtcggcatcataactctcgcgcaggcgaacgtactcccacaatgaggcgttaacgacggcctcctcttgagttgcaggcaatcgcgagacagacacctcgctgtcaacggtgccgtccggccgtatccatagatatacgggcacaagcctgctcaacggcaccattgtggctatagcgaacgcttgagcaacatttcccaaaatcgcgatagctgcgacagctgcaatgagtttggagagacgtcgcgccgatttcgctcgcgcggtttgaaaggcttctacttccttatagtgctcggcaaggctttcgcgcgccactagcatggcatattcaggccccgtcatagcgtccacccgaattgccgagctgaagatctgacggagtaggctgccatcgccccacattcagcgggaagatcgggcctttgcagctcgctaatgtgtcgtttgtctggcagccgctcaaagcgacaactaggcacagcaggcaatacttcatagaattctccattgaggcgaatttttgcgcgacctagcctcgctcaacctgagcgaagcgacggtacaagctgctggcagattgggttgcgccgctccagtaactgcctccaatgttgccggcgatcgccggcaaagcgacaatgagcgcatcccctgtcagaaaaaacatatcgagttcgtaaagaccaatgatcttggccgcggtcgtaccggcgaaggtgattacaccaagcataagggtgagcgcagtcgcttcggttaggatgacgatcgttgccacgaggtttaagaggagaagcaagagaccgtaggtgataagttgcccgatccacttagctgcgatgtcccgcgtgcgatcaaaaatatatccgacgaggatcagaggcccgatcgcgagaagcactttcgtgagaattccaacggcgtcgtaaactccgaaggcagaccagagcgtgccgtaaaggacccactgtgccccttggaaagcaaggatgtcctggtcgttcatcggaccgatttcggatgcgattttctgaaaaacggcctgggtcacggcgaacattgtatccaactgtgccggaacagtctgcagaggcaagccggttacactaaactgctgaacaaagtttgggaccgtcttttcgaagatggaaaccacatagtcttggtagttagcctgcccaacaattagagcaacaacgatggtgaccgtgatcacccgagtgataccgctacgggtatcgacttcgccgcgtatgactaaaataccctgaacaataatccaaagagtgacacaggcgatcaatggcgcactcaccgcctcctggatagtctcaagcatcgagtccaagcctgtcgtgaaggctacatcgaagatcgtatgaatggccgtaaacggcgccggaatcgtgaaattcatcgattggacctgaacttgactggtttgtcgcataatgttggataaaatgagctcgcattcggcgaggatgcgggcggatgaacaaatcgcccagccttaggggagggcaccaaagatgacagcggtcttttgatgctccttgcgttgagcggccgcctcttccgcctcgtgaaggccggcctgcgcggtagtcatcgttaataggcttgtcgcctgtacattttgaatcattgcgtcatggatctgcttgagaagcaaaccattggtcacggttgcctgcatgatattgcgagatcgggaaagctgagcagacgtatcagcattcgccgtcaagcgtttgtccatcgtttccagattgtcagccgcaatgccagcgctgtttgcggaaccggtgatctgcgatcgcaacaggtccgcttcagcatcactacccacgactgcacgatctgtatcgctggtgatcgcacgtgccgtggtcgacattggcattcgcggcgaaaacatttcattgtctaggtccttcgtcgaaggatactgatttttctggttgagcgaagtcagtagtccagtaacgccgtaggccgacgtcaacatcgtaaccatcgctatagtctgagtgagattctccgcagtcgcgagcgcagtcgcgagcgtctcagcctccgttgccgggtcgctaacaacaaactgcgcccgcgcgggctgaatatatagaaagctgcaggtcaaaactgttgcaataagttgcgtcgtcttcatcgtttcctaccttatcaatcttctgcctcgtggtgacgggccatgaattcgctgagccagccagatgagttgccttcttgtgcctcgcgtagtcgagttgcaaagcgcaccgtgttggcacgccccgaaagcacggcgacatattcacgcatatcccgcagatcaaattcgcagatgacgcttccactttctcgtttaagaagaaacttacggctgccgaccgtcatgtcttcacggatcgcctgaaattccttttcggtacatttcagtccatcgacataagccgatcgatctgcggttggtgatggatagaaaatcttcgtcatacattgcgcaaccaagctggctcctagcggcgattccagaacatgctctggttgctgcgttgccagtattagcatcccgttgttttttcgaacggtcaggaggaatttgtcgacgacagtcgaaaatttagggtttaacaaataggcgcgaaactcatcgcagctcatcacaaaacggcggccgtcgatcatggctccaatccgatgcaggagatatgctgcagcgggagcgcatacttcctcgtattcgagaagatgcgtcatgtcgaagccggtaatcgacggatctaactttacttcgtcaacttcgccgtcaaatgcccagccaagcgcatggccccggcaccagcgttggagccgcgctcctgcgccttcggcgggcccatgcaacaaaaattcacgtaaccccgcgattgaacgcatttgtggatcaaacgagagctgacgatggataccacggaccagacggcggttctcttccggagaaatcccaccccgaccatcactctcgatgagagccacgatccattcgcgcagaaaatcgtgtgaggctgctgtgttttctaggccacgcaacggcgccaacccgctgggtgtgcctctgtgaagtgccaaatatgttcctcctgtggcgcgaaccagcaattcgccaccccggtccttgtcaaagaacacgaccgtacctgcacggtcgaccatgctctgttcgagcatggctagaacaaacatcatgagcgtcgtcttacccctcccgataggcccgaatattgccgtcatgccaacatcgtgctcatgcgggatatagtcgaaaggcgttccgccattggtacgaaatcgggcaatcgcgttgccccagtggcctgagctggcgccctctggaaagttttcgaaagagacaaaccctgcgaaattgcgtgaagtgattgcgccagggcgtgtgcgccacttaaaattccccggcaattgggaccaataggccgcttccataccaataccttcttggacaaccacggcacctgcatccgccattcgtgtccgagcccgcgcgcccctgtccccaagactattgagatcgtctgcatagacgcaaaggctcaaatgatgtgagcccataacgaattcgttgctcgcaagtgcgtcctcagcctcggataatttgccgatttgagtcacggctttatcgccggaactcagcatctggctcgatttgaggctaagtttcgcgtgcgcttgcgggcgagtcaggaacgaaaaactctgcgtgagaacaagtggaaaatcgagggatagcagcgcgttgagcatgcccggccgtgtttttgcagggtattcgcgaaacgaatagatggatccaacgtaactgtcttttggcgttctgatctcgagtcctcgcttgccgcaaatgactctgtcggtataaatcgaagcgccgagtgagccgctgacgaccggaaccggtgtgaaccgaccagtcatgatcaaccgtagcgcttcgccaatttcggtgaagagcacaccctgcttctcgcggatgccaagacgatgcaggccatacgctttaagagagccagcgacaacatgccaaagatcttccatgttcctgatctggcccgtgagatcgttttccctttttccgcttagcttggtgaacctcctctttaccttccctaaagccgcctgtgggtagacaatcaacgtaaggaagtgttcattgcggaggagttggccggagagcacgcgctgttcaaaagcttcgttcaggctagcggcgaaaacactacggaagtgtcgcggcgccgatgatggcacgtcggcatgacgtacgaggtgagcatatattgacacatgatcatcagcgatattgcgcaacagcgtgttgaacgcacgacaacgcgcattgcgcatttcagtttcctcaagctcgaatgcaacgccatcaattctcgcaatggtcatgatcgatccgtcttcaagaaggacgatatggtcgctgaggtggccaatataagggagatagatctcaccggatctttcggtcgttccactcgcgccgagcatcacaccattcctctccctcgtgggggaaccctaattggatttgggctaacagtagcgcccccccaaactgcactatcaatgcttcttcccgcggtccgcaaaaatagcaggacgacgctcgccgcattgtagtctcgctccacgatgagccgggctgcaaaccataacggcacgagaacgacttcgtagagcgggttctgaacgataacgatgacaaagccggcgaacatcatgaataaccctgccaatgtcagtggcaccccaagaaacaatgcgggccgtgtggctgcgaggtaaagggtcgattcttccaaacgatcagccatcaactaccgccagtgagcgtttggccgaggaagctcgccccaaacatgataacaatgccgccgacgacgccggcaaccagcccaagcgaagcccgcccgaacatccaggagatcccgatagcgacaatgccgagaacagcgagtgactggccgaacggaccaaggataaacgtgcatatattgttaaccattgtggcggggtcagtgccgccacccgcagattgcgctgcggcgggtccggatgaggaaatgctccatgcaattgcaccgcacaagcttggggcgcagctcgatatcacgcgcatcatcgcattcgagagcgagaggcgatttagatgtaaacggtatctctcaaagcatcgcatcaatgcgcacctccttagtataagtcgaataagacttgattgtcgtctgcggatttgccgttgtcctggtgtggcggtggcggagcgattaaaccgccagcgccatcctcctgcgagcggcgctgatatgacccccaaacatcccacgtctcttcggattttagcgcctcgtgatcgtcttttggaggctcgattaacgcgggcaccagcgattgagcagctgtttcaacttttcgcacgtagccgtttgcaaaaccgccgatgaaattaccggtgttgtaagcggagatcgcccgacgaagcgcaaattgcttctcgtcaatcgtttcgccgcctgcataacgacttttcagcatgtttgcagcggcagataatgatgtgcacgcctggagcgcaccgtcaggtgtcagaccgagcatagaaaaatttcgagagtttatttgcatgaggccaacatccagcgaatgccgtgcatcgagacggtgcctgacgacttgggttgcttggctgtgatcttgccagtgaagcgtttcgccggtcgtgttgtcatgaatcgctaaaggatcaaagcgactctccaccttagctatcgccgcaagcgtagatgtcgcaactgatggggcacacttgcgagcaacatggtcaaactcagcagatgagagtggcgtggcaaggctcgacgaacagaaggagaccatcaaggcaagagaaagcgaccccgatctcttaagcataccttatctccttagctcgcaactaacaccgcctctcccgttggaagaagtgcgttgttttatgttgaagattatcgggagggtcggttactcgaaaattttcaattgcttctttatgatttcaattgaagcgagaaacctcgcccggcgtcttggaacgcaacatggaccgagaaccgcgcatccatgactaagcaaccggatcgacctattcaggccgcagttggtcaggtcaggctcagaacgaaaatgctcggcgaggttacgctgtctgtaaacccattcgatgaacgggaagcttccttccgattgctcttggcaggaatattggcccatgcctgcttgcgctttgcaaatgctcttatcgcgttggtatcatatgccttgtccgccagcagaaacgcactctaagcgattatttgtaaaaatgtttcggtcatgcggcggtcatgggcttgacccgctgtcagcgcaagacggatcggtcaaccgtcggcatcgacaacagcgtgaatcttggtggtcaaaccgccacgggaacgtcccatacagccatcgtcttgatcccgctgtttcccgtcgccgcatgttggtggacgcggacacaggaactgtcaatcatgacgacattctatcgaaagccttggaaatcacactcagaatatgatcccagacgtctgcctcacgccatcgtacaaagcgattgtagcaggttgtacaggaaccgtatcgatcaggaacgtctgcccagggcgggcccgtccggaagcgccacaagatgacattgatcacccgcgtcaacgcgcggcacgcgacgcggcttatttgggaacaaaggactgaacaacagtccattcgaaatcggtgacatcaaagcggggacgggttatcagtggcctccaagtcaagcctcaatgaatcaaaatcagaccgatttgcaaacctgatttatgagtgtgcggcctaaatgatgaaatcgtccttctagatcgcctccgtggtgtagcaacacctcgcagtatcgccgtgctgaccttggccagggaattgactggcaagggtgctttcacatgaccgctcttttggccgcgatagatgatttcgttgctgctttgggcacgtagaaggagagaagtcatatcggagaaattcctcctggcgcgagagcctgctctatcgcgacggcatcccactgtcgggaacagaccggatcattcacgaggcgaaagtcgtcaacacatgcgttataggcatcttcccttgaaggatgatcttgttgctgccaatctggaggtgcggcagccgcaggcagatgcgatctcagcgcaacttgcggcaaaacatctcactcacctgaaaaccactagcgagtctcgcgatcagacgaaggccttttacttaacgacacaatatccgatgtctgcatcacaggcgtcgctatcccagtcaatactaaagcggtgcaggaactaaagattactgatgacttaggcgtgccacgaggcctgagacgacgcgcgtagacagttttttgaaatcattatcaaagtgatggcctccgctgaagcctatcacctctgcgccggtctgtcggagagatgggcaagcattattacggtcttcgcgcccgtacatgcattggacgattgcagggtcaatggatctgagatcatccagaggattgccgcccttaccttccgtttcgagttggagccagcccctaaatgagacgacatagtcgacttgatgtgacaatgccaagagagagatttgcttaacccgatttttttgctcaagcgtaagcctattgaagcttgccggcatgacgtccgcgccgaaagaatatcctacaagtaaaacattctgcacaccgaaatgcttggtgtagacatcgattatgtgaccaagatccttagcagtttcgcttggggaccgctccgaccagaaataccgaagtgaactgacgccaatgacaggaatcccttccgtctgcagataggtaccatcgatagatctgctgcctcgcgcgtttcggtgatgacggtgaaaacctctgacacatgcagctcccggagacggtcacagcttgtctgtaagcggatgccgggagcagacaagcccgtcagggcgcgtcagcgggtgttggcgggtgtcggggcgcagccatgacccagtcacgtagcgatagcggagtgtatactggcttaactatgcggcatcagagcagattgtactgagagtgcaccatatgcggtgtgaaataccgcacagatgcgtaaggagaaaataccgcatcaggcgctcttccgcttcctcgctcactgactcgctgcgctcggtcgttcggctgcggcgagcggtatcagctcactcaaaggcggtaatacggttatccacagaatcaggggataacgcaggaaagaacatgtgagcaaaaggccagcaaaaggccaggaaccgtaaaaaggccgcgttgctggcgtttttccataggctccgcccccctgacgagcatcacaaaaatcgacgctcaagtcagaggtggcgaaacccgacaggactataaagataccaggcgtttccccctggaagctccctcgtgcgctctcctgttccgaccctgccgcttaccggatacctgtccgcctttctcccttcgggaagcgtggcgctttctcatagctcacgctgtaggtatctcagttcggtgtaggtcgttcgctccaagctgggctgtgtgcacgaaccccccgttcagcccgaccgctgcgccttatccggtaactatcgtcttgagtccaacccggtaagacacgacttatcgccactggcagcagccactggtaacaggattagcagagcgaggtatgtaggcggtgctacagagttcttgaagtggtggcctaactacggctacactagaaggacagtatttggtatctgcgctctgctgaagccagttaccttcggaaaaagagttggtagctcttgatccggcaaacaaaccaccgctggtagcggtggtttttttgtttgcaagcagcagattacgcgcagaaaaaaaggatctcaagaagatcctttgatcttttctacggggtctgacgctcagtggaacgaaaactcacgttaagggattttggtcatgagattatcaaaaaggatcttcacctagatccttttaaattaaaaatgaagttttaaatcaatctaaagtatatatgagtaaacttggtctgacagttaccaatgcttaatcagtgaggcacctatctcagcgatctgtctatttcgttcatccatagttgcctgactccccgtcgtgtagataactacgatacgggagggcttaccatctggccccagtgctgcaatgataccgcgagacccacgctcaccggctccagatttatcagcaataaaccagccagccggaagggccgagcgcagaagtggtcctgcaactttatccgcctccatccagtctattaattgttgccgggaagctagagtaagtagttcgccagttaatagtttgcgcaacgttgttgccattgctgcaggggggggggggggggggttccattgttcattccacggacaaaaacagagaaaggaaacgacagaggccaaaaagctcgctttcagcacctgtcgtttcctttcttttcagagggtattttaaataaaaacattaagttatgacgaagaagaacggaaacgccttaaaccggaaaattttcataaatagcgaaaacccgcgaggtcgccgccccgtaacctgtcggatcaccggaaaggacccgtaaagtgataatgattatcatctacatatcacaacgtgcgtggaggccatcaaaccacgtcaaataatcaattatgacgcaggtatcgtattaattgatctgcatcaacttaacgtaaaaacaacttcagacaatacaaatcagcgacactgaatacggggcaacctcatgtcccccccccccccccccctgcaggcatcgtggtgtcacgctcgtcgtttggtatggcttcattcagctccggttcccaacgatcaaggcgagttacatgatcccccatgttgtgcaaaaaagcggttagctccttcggtcctccgatcgttgtcagaagtaagttggccgcagtgttatcactcatggttatggcagcactgcataattctcttactgtcatgccatccgtaagatgcttttctgtgactggtgagtactcaaccaagtcattctgagaatagtgtatgcggcgaccgagttgctcttgcccggcgtcaacacgggataataccgcgccacatagcagaactttaaaagtgctcatcattggaaaacgttcttcggggcgaaaactctcaaggatcttaccgctgttgagatccagttcgatgtaacccactcgtgcacccaactgatcttcagcatcttttactttcaccagcgtttctgggtgagcaaaaacaggaaggcaaaatgccgcaaaaaagggaataagggcgacacggaaatgttgaatactcatactcttcctttttcaatattattgaagcatttatcagggttattgtctcatgagcggatacatatttgaatgtatttagaaaaataaacaaataggggttccgcgcacatttccccgaaaagtgccacctgacgtctaagaaaccattattatcatgacattaacctataaaaataggcgtatcacgaggccctttcgtcttcaagaattcggagcttttgccattctcaccggattcagtcgtcactcatggtgatttctcacttgataaccttatttttgacgaggggaaattaataggttgtattgatgttggacgagtcggaatcgcagaccgataccaggatcttgccatcctatggaactgcctcggtgagttttctccttcattacagaaacggctttttcaaaaatatggtattgataatcctgatatgaataaattgcagtttcatttgatgctcgatgagtttttctaatcagaattggttaattggttgtaacactggcagagcattacgctgacttgacgggacggcggctttgttgaataaatcgaacttttgctgagttgaaggatcagatcacgcatcttcccgacaacgcagaccgttccgtggcaaagcaaaagttcaaaatcaccaactggtccacctacaacaaagctctcatcaaccgtggctccctcactttctggctggatgatggggcgattcaggcctggtatgagtcagcaacaccttcttcacgaggcagacctcagcgccagaaggccgccagagaggccgagcgcggccgtgaggcttggacgctagggcagggcatgaaaaagcccgtagcgggctgctacgggcgtctgacgcggtggaaagggggaggggatgttgtctacatggctctgctgtagtgagtgggttgcgctccggcagcggtcctgatcaatcgtcaccctttctcggtccttcaacgttcctgacaacgagcctccttttcgccaatccatcgacaatcaccgcgagtccctgctcgaacgctgcgtccggaccggcttcgtcgaaggcgtctatcgcggcccgcaacagcggcgagagcggagcctgttcaacggtgccgccgcgctcgccggcatcgctgtcgccggcctgctcctcaagcacggccccaacagtgaagtagctgattgtcatcagcgcattgacggcgtccccggccgaaaaacccgcctcgcagaggaagcgaagctgcgcgtcggccgtttccatctgcggtgcgcccggtcgcgtgccggcatggatgcgcgcgccatcgcggtaggcgagcagcgcctgcctgaagctgcgggcattcccgatcagaaatgagcgccagtcgtcgtcggctctcggcaccgaatgcgtatgattctccgccagcatggcttcggccagtgcgtcgagcagcgcccgcttgttcctgaagtgccagtaaagcgccggctgctgaacccccaaccgttccgccagtttgcgtgtcgtcagaccgtctacgccgacctcgttcaacaggtccagggcggcacggatcactgtattcggctgcaactttgtcatgcttgacactttatcactgataaacataatatgtccaccaacttatcagtgataaagaatccgcgcgttcaatcggaccagcggaggctggtccggaggccagacgtgaaacccaacatacccctgatcgtaattctgagcactgtcgcgctcgacgctgtcggcatcggcctgattatgccggtgctgccgggcctcctgcgcgatctggttcactcgaacgacgtcaccgcccactatggcattctgctggcgctgtatgcgttggtgcaatttgcctgcgcacctgtgctgggcgcgctgtcggatcgtttcgggcggcggccaatcttgctcgtctcgctggccggcgccactgtcgactacgccatcatggcgacagcgcctttcctttgggttctctatatcgggcggatcgtggccggcatcaccggggcgactggggcggtagccggcgcttatattgccgatatcactgatggcgatgagcgcgcgcggcacttcggcttcatgagcgcctgtttcgggttcgggatggtcgcgggacctgtgctcggtgggctgatgggcggtttctccccccacgctccgttcttcgccgcggcagccttgaacggcctcaatttcctgacgggctgtttccttttgccggagtcgcacaaaggcgaacgccggccgttacgccgggaggctctcaacccgctcgcttcgttccggtgggcccggggcatgaccgtcgtcgccgccctgatggcggtcttcttcatcatgcaacttgtcggacaggtgccggccgcgctttgggtcattttcggcgaggatcgctttcactgggacgcgaccacgatcggcatttcgcttgccgcatttggcattctgcattcactcgcccaggcaatgatcaccggccctgtagccgcccggctcggcgaaaggcgggcactcatgctcggaatgattgccgacggcacaggctacatcctgcttgccttcgcgacacggggatggatggcgttcccgatcatggtcctgcttgcttcgggtggcatcggaatgccggcgctgcaagcaatgttgtccaggcaggtggatgaggaacgtcaggggcagctgcaaggctcactggcggcgctcaccagcctgacctcgatcgtcggacccctcctcttcacggcgatctatgcggcttctataacaacgtggaacgggtgggcatggattgcaggcgctgccctctacttgctctgcctgccggcgctgcgtcgcgggctttggagcggcgcagggcaacgagccgatcgctgatcgtggaaacgataggcctatgccatgcgggtcaaggcgacttccggcaagctatacgcgccctaggagtgcggttggaacgttggcccagccagatactcccgatcacgagcaggacgccgatgatttgaagcgcactcagcgtctgatccaagaacaaccatcctagcaacacggcggtccccgggctgagaaagcccagtaaggaaacaactgtaggttcgagtcgcgagatcccccggaaccaaaggaagtaggttaaacccgctccgatcaggccgagccacgccaggccgagaacattggttcctgtaggcatcgggattggcggatcaaacactaaagctactggaacgagcagaagtcctccggccgccagttgccaggcggtaaaggtgagcagaggcacgggaggttgccacttgcgggtcagcacggttccgaacgccatggaaaccgcccccgccaggcccgctgcgacgccgacaggatctagcgctgcgtttggtgtcaacaccaacagcgccacgcccgcagttccgcaaatagcccccaggaccgccatcaatcgtatcgggctacctagcagagcggcagagatgaacacgaccatcagcggctgcacagcgcctaccgtcgccgcgaccccgcccggcaggcggtagaccgaaataaacaacaagctccagaatagcgaaatattaagtgcgccgaggatgaagatgcgcatccaccagattcccgttggaatctgtcggacgatcatcacgagcaataaacccgccggcaacgcccgcagcagcataccggcgacccctcggcctcgctgttcgggctccacgaaaacgccggacagatgcgccttgtgagcgtccttggggccgtcctcctgtttgaagaccgacagcccaatgatctcgccgtcgatgtaggcgccgaatgccacggcatctcgcaaccgttcagcgaacgcctccatgggctttttctcctcgtgctcgtaaacggacccgaacatctctggagctttcttcagggccgacaatcggatctcgcggaaatcctgcacgtcggccgctccaagccgtcgaatctgagccttaatcacaattgtcaattttaatcctctgtttatcggcagttcgtagagcgcgccgtgcgtcccgagcgatactgagcgaagcaagtgcgtcgagcagtgcccgcttgttcctgaaatgccagtaaagcgctggctgctgaacccccagccggaactgaccccacaaggccctagcgtttgcaatgcaccaggtcatcattgacccaggcgtgttccaccaggccgctgcctcgcaactcttcgcaggcttcgccgacctgctcgcgccacttcttcacgcgggtggaatccgatccgcacatgaggcggaaggtttccagcttgagcgggtacggctcccggtgcgagctgaaatagtcgaacatccgtcgggccgtcggcgacagcttgcggtacttctcccatatgaatttcgtgtagtggtcgccagcaaacagcacgacgatttcctcgtcgatcaggacctggcaacgggacgttttcttgccacggtccaggacgcggaagcggtgcagcagcgacaccgattccaggtgcccaacgcggtcggacgtgaagcccatcgccgtcgcctgtaggcgcgacaggcattcctcggccttcgtgtaataccggccattgatcgaccagcccaggtcctggcaaagctcgtagaacgtgaaggtgatcggctcgccgataggggtgcgcttcgcgtactccaacacctgctgccacaccagttcgtcatcgtcggcccgcagctcgacgccggtgtaggtgatcttcacgtccttgttgacgtggaaaatgaccttgttttgcagcgcctcgcgcgggattttcttgttgcgcgtggtgaacagggcagagcgggccgtgtcgtttggcatcgctcgcatcgtgtccggccacggcgcaatatcgaacaaggaaagctgcatttccttgatctgctgcttcgtgtgtttcagcaacgcggcctgcttggcctcgctgacctgttttgccaggtcctcgccggcggtttttcgcttcttggtcgtcatagttcctcgcgtgtcgatggtcatcgacttcgccaaacctgccgcctcctgttcgagacgacgcgaacgctccacggcggccgatggcgcgggcagggcagggggagccagttgcacgctgtcgcgctcgatcttggccgtagcttgctggaccatcgagccgacggactggaaggtttcgcggggcgcacgcatgacggtgcggcttgcgatggtttcggcatcctcggcggaaaaccccgcgtcgatcagttcttgcctgtatgccttccggtcaaacgtccgattcattcaccctccttgcgggattgccccgactcacgccggggcaatgtgcccttattcctgatttgacccgcctggtgccttggtgtccagataatccaccttatcggcaatgaagtcggtcccgtagaccgtctggccgtccttctcgtacttggtattccgaatcttgccctgcacgaataccagcgaccccttgcccaaatacttgccgtgggcctcggcctgagagccaaaacacttgatgcggaagaagtcggtgcgctcctgcttgtcgccggcatcgttgcgccactcttcattaaccgctatatcgaaaattgcttgcggcttgttagaattgccatgacgtacctcggtgtcacgggtaagattaccgataaactggaactgattatggctcatatcgaaagtctccttgagaaaggagactctagtttagctaaacattggttccgctgtcaagaactttagcggctaaaattttgcgggccgcgaccaaaggtgcgaggggcggcttccgctgtgtacaaccagatatttttcaccaacatccttcgtctgctcgatgagcggggcatgacgaaacatgagctgtcggagagggcaggggtttcaatttcgtttttatcagacttaaccaacggtaaggccaacccctcgttgaaggtgatggaggccattgccgacgccctggaaactcccctacctcttctcctggagtccaccgaccttgaccgcgaggcactcgcggagattgcgggtcatcctttcaagagcagcgtgccgcccggatacgaacgcatcagtgtggttttgccgtcacataaggcgtttatcgtaaagaaatggggcgacgacacccgaaaaaagctgcgtggaaggctctgacgccaagggttagggcttgcacttccttctttagccgctaaaacggccccttctctgcgggccgtcggctcgcgcatcatatcgacatcctcaacggaagccgtgccgcgaatggcatcgggcgggtgcgctttgacagttgttttctatcagaacccctacgtcgtgcggttcgattagctgtttgtcttgcaggctaaacactttcggtatatcgtttgcctgtgcgataatgttgctaatgatttgttgcgtaggggttactgaaaagtgagcgggaaagaagagtttcagaccatcaaggagcgggccaagcgcaagctggaacgcgacatgggtgcggacctgttggccgcgctcaacgacccgaaaaccgttgaagtcatgctcaacgcggacggcaaggtgtggcacgaacgccttggcgagccgatgcggtacatctgcgacatgcggcccagccagtcgcaggcgattatagaaacggtggccggattccacggcaaagaggtcacgcggcattcgcccatcctggaaggcgagttccccttggatggcagccgctttgccggccaattgccgccggtcgtggccgcgccaacctttgcgatccgcaagcgcgcggtcgccatcttcacgctggaacagtacgtcgaggcgggcatcatgacccgcgagcaatacgaggtcattaaaagcgccgtcgcggcgcatcgaaacatcctcgtcattggcggtactggctcgggcaagaccacgctcgtcaacgcgatcatcaatgaaatggtcgccttcaacccgtctgagcgcgtcgtcatcatcgaggacaccggcgaaatccagtgcgccgcagagaacgccgtccaataccacaccagcatcgacgtctcgatgacgctgctgctcaagacaacgctgcgtatgcgccccgaccgcatcctggtcggtgaggtacgtggccccgaagcccttgatctgttgatggcctggaacaccgggcatgaaggaggtgccgccaccctgcacgcaaacaaccccaaagcgggcctgagccggctcgccatgcttatcagcatgcacccggattcaccgaaacccattgagccgctgattggcgaggcggttcatgtggtcgtccatatcgccaggacccctagcggccgtcgagtgcaagaaattctcgaagttcttggttacgagaacggccagtacatcaccaaaaccctgtaaggagtatttccaatgacaacggctgttccgttccgtctgaccatgaatcgcggcattttgttctaccttgccgtgttcttcgttctcgctctcgcgttatccgcgcatccggcgatggcctcggaaggcaccggcggcagcttgccatatgagagctggctgacgaacctgcgcaactccgtaaccggcccggtggccttcgcgctgtccatcatcggcatcgtcgtcgccggcggcgtgctgatcttcggcggcgaactcaacgccttcttccgaaccctgatcttcctggttctggtgatggcgctgctggtcggcgcgcagaacgtgatgagcaccttcttcggtcgtggtgccgaaatcgcggccctcggcaacggggcgctgcaccaggtgcaagtcgcggcggcggatgccgtgcgtgcggtagcggctggacggctcgcctaatcatggctctgcgcacgatccccatccgtcgcgcaggcaaccgagaaaacctgttcatgggtggtgatcgtgaactggtgatgttctcgggcctgatggcgtttgcgctgattttcagcgcccaagagctgcgggccaccgtggtcggtctgatcctgtggttcggggcgctctatgcgttccgaatcatggcgaaggccgatccgaagatgcggttcgtgtacctgcgtcaccgccggtacaagccgtattacccggcccgctcgaccccgttccgcgagaacaccaatagccaagggaagcaataccgatgatccaagcaattgcgattgcaatcgcgggcctcggcgcgcttctgttgttcatcctctttgcccgcatccgcgcggtcgatgccgaactgaaactgaaaaagcatcgttccaaggacgccggcctggccgatctgctcaactacgccgctgtcgtcgatgacggcgtaatcgtgggcaagaacggcagctttatggctgcctggctgtacaagggcgatgacaacgcaagcagcaccgaccagcagcgcgaagtagtgtccgcccgcatcaaccaggccctcgcgggcctgggaagtgggtggatgatccatgtggacgccgtgcggcgtcctgctccgaactacgcggagcggggcctgtcggcgttccctgaccgtctgacggcagcgattgaagaagagcgctcggtcttgccttgctcgtcggtgatgtacttcaccagctccgcgaagtcgctcttcttgatggagcgcatggggacgtgcttggcaatcacgcgcaccccccggccgttttagcggctaaaaaagtcatggctctgccctcgggcggaccacgcccatcatgaccttgccaagctcgtcctgcttctcttcgatcttcgccagcagggcgaggatcgtggcatcaccgaaccgcgccgtgcgcgggtcgtcggtgagccagagtttcagcaggccgcccaggcggcccaggtcgccattgatgcgggccagctcgcggacgtgctcatagtccacgacgcccgtgattttgtagccctggccgacggccagcaggtaggccgacaggctcatgccggccgccgccgccttttcctcaatcgctcttcgttcgtctggaaggcagtacaccttgataggtgggctgcccttcctggttggcttggtttcatcagccatccgcttgccctcatctgttacgccggcggtagccggccagcctcgcagagcaggattcccgttgagcaccgccaggtgcgaataagggacagtgaagaaggaacacccgctcgcgggtgggcctacttcacctatcctgcccggctgacgccgttggatacaccaaggaaagtctacacgaaccctttggcaaaatcctgtatatcgtgcgaaaaaggatggatataccgaaaaaatcgctataatgaccccgaagcagggttatgcagcggaaaagcgctgcttccctgctgttttgtggaatatctaccgactggaaacaggcaaatgcaggaaattactgaactgaggggacaggcgagagacgatgccaaagagctacaccgacgagctggccgagtgggttgaatcccgcgcggccaagaagcgccggcgtgatgaggctgcggttgcgttcctggcggtgagggcggatgtcgaggcggcgttagcgtccggctatgcgctcgtcaccatttgggagcacatgcgggaaacggggaaggtcaagttctcctacgagacgttccgctcgcacgccaggcggcacatcaaggccaagcccgccgatgtgcccgcaccgcaggccaaggctgcggaacccgcgccggcacccaagacgccggagccacggcggccgaagcaggggggcaaggctgaaaagccggcccccgctgcggccccgaccggcttcaccttcaacccaacaccggacaaaaaggatctactgtaatggcgaaaattcacatggttttgcagggcaagggcggggtcggcaagtcggccatcgccgcgatcattgcgcagtacaagatggacaaggggcagacacccttgtgcatcgacaccgacccggtgaacgcgacgttcgagggctacaaggccctgaacgtccgccggctgaacatcatggccggcgacgaaattaactcgcgcaacttcgacaccctggtcgagctgattgcgccgaccaaggatgacgtggtgatcgacaacggtgccagctcgttcgtgcctctgtcgcattacctcatcagcaaccaggtgccggctctgctgcaagaaatggggcatgagctggtcatccataccgtcgtcaccggcggccaggctctcctggacacggtgagcggcttcgcccagctcgccagccagttcccggccgaagcgcttttcgtggtctggctgaacccgtattgggggcctatcgagcatgagggcaagagctttgagcagatgaaggcgtacacggccaacaaggcccgcgtgtcgtccatcatccagattccggccctcaaggaagaaacctacggccgcgatttcagcgacatgctgcaagagcggctgacgttcgaccaggcgctggccgatgaatcgctcacgatcatgacgcggcaacgcctcaagatcgtgcggcgcggcctgtttgaacagctcgacgcggcggccgtgctatgagcgaccagattgaagagctgatccgggagattgcggccaagcacggcatcgccgtcggccgcgacgacccggtgctgatcctgcataccatcaacgcccggctcatggccgacagtgcggccaagcaagaggaaatccttgccgcgttcaaggaagagctggaagggatcgcccatcgttggggcgaggacgccaaggccaaagcggagcggatgctgaacgcggccctggcggccagcaaggacgcaatggcgaaggtaatgaaggacagcgccgcgcaggcggccgaagcgatccgcagggaaatcgacgacggccttggccgccagctcgcggccaaggtcgcggacgcgcggcgcgtggcgatgatgaacatgatcgccggcggcatggtgttgttcgcggccgccctggtggtgtgggcctcgttatgaatcgcagaggcgcagatgaaaaagcccggcgttgccgggctttgtttttgcgttagctgggcttgtttgacaggcccaagctctgactgcgcccgcgctcgcgctcctgggcctgtttcttctcctgctcctgcttgcgcatcagggcctggtgccgtcgggctgcttcacgcatcgaatcccagtcgccggccagctcgggatgctccgcgcgcatcttgcgcgtcgccagttcctcgatcttgggcgcgtgaatgcccatgccttccttgatttcgcgcaccatgtccagccgcgtgtgcagggtctgcaagcgggcttgctgttgggcctgctgctgctgccaggcggcctttgtacgcggcagggacagcaagccgggggcattggactgtagctgctgcaaacgcgcctgctgacggtctacgagctgttctaggcggtcctcgatgcgctccacctggtcatgctttgcctgcacgtagagcgcaagggtctgctggtaggtctgctcgatgggcgcggattctaagagggcctgctgttccgtctcggcctcctgggccgcctgtagcaaatcctcgccgctgttgccgctggactgctttactgccggggactgctgttgccctgctcgcgccgtcgtcgcagttcggcttgcccccactcgattgactgcttcatttcgagccgcagcgatgcgatctcggattgcgtcaacggacggggcagcgcggaggtgtccggcttctccttgggtgagtcggtcgatgccatagccaaaggtttccttccaaaatgcgtccattgctggaccgtgtttctcattgatgcccgcaagcatcttcggcttgaccgccaggtcaagcgcgccttcatgggcggtcatgacggacgccgccatgaccttgccgccgttgttctcgatgtagccgcgtaatgaggcaatggtgccgcccatcgtcagcgtgtcatcgacaacgatgtacttctggccggggatcacctccccctcgaaagtcgggttgaacgccaggcgatgatctgaaccggctccggttcgggcgaccttctcccgctgcacaatgtccgtttcgacctcaaggccaaggcggtcggccagaacgaccgccatcatggccggaatcttgttgttccccgccgcctcgacggcgaggactggaacgatgcggggcttgtcgtcgccgatcagcgtcttgagctgggcaacagtgtcgtccgaaatcaggcgctcgaccaaattaagcgccgcttccgcgtcgccctgcttcgcagcctggtattcaggctcgttggtcaaagaaccaaggtcgccgttgcgaaccaccttcgggaagtctccccacggtgcgcgctcggctctgctgtagctgctcaagacgcctccctttttagccgctaaaactctaacgagtgcgcccgcgactcaacttgacgctttcggcacttacctgtgccttgccacttgcgtcataggtgatgcttttcgcactcccgatttcaggtactttatcgaaatctgaccgggcgtgcattacaaagttcttccccacctgttggtaaatgctgccgctatctgcgtggacgatgctgccgtcgtggcgctgcgacttatcggccttttgggccatatagatgttgtaaatgccaggtttcagggccccggctttatctaccttctggttcgtccatgcgccttggttctcggtctggacaattctttgcccattcatgaccaggaggcggtgtttcattgggtgactcctgacggttgcctctggtgttaaacgtgtcctggtcgcttgccggctaaaaaaaagccgacctcggcagttcgaggccggctttccctagagccgggcgcgtcaaggttgttccatctattttagtgaactgcgttcgatttatcagttactttcctcccgctttgtgtttcctcccactcgtttccgcgtctagccgacccctcaacatagcggcctcttcttgggctgcctttgcctcttgccgcgcttcgtcacgctcggcttgcaccgtcgtaaagcgctcggcctgcctggccgcctcttgcgccgccaacttcctttgctcctggtgggcctcggcgtcggcctgcgccttcgctttcaccgctgccaactccgtgcgcaaactctccgcttcgcgcctggtggcgtcgcgctcgccgcgaagcgcctgcatttcctggttggccgcgtccagggtcttgcggctctcttctttgaatgcgcgggcgtcctggtgagcgtagtccagctcggcgcgcagctcctgcgctcgacgctccacctcgtcggcccgctgcgtcgccagcgcggcccgctgctcggctcctgccagggcggtgcgtgcttcggccagggcttgccgctggcgtgcggccagctcggccgcctcggcggcctgctgctctagcaatgtaacgcgcgcctgggcttcttccagctcgcgggcctgcgcctcgaaggcgtcggccagctccccgcgcacggcttccaactcgttgcgctcacgatcccagccggcttgcgctgcctgcaacgattcattggcaagggcctgggcggcttgccagagggcggccacggcctggttgccggcctgctgcaccgcgtccggcacctggactgccagcggggcggcctgcgccgtgcgctggcgtcgccattcgcgcatgccggcgctggcgtcgttcatgttgacgcgggcggccttacgcactgcatccacggtcgggaagttctcccggtcgccttgctcgaacagctcgtccgcagccgcaaaaatgcggtcgcgcgtctctttgttcagttccatgttggctccggtaattggtaagaataataatactcttacctaccttatcagcgcaagagtttagctgaacagttctcgacttaacggcaggttttttagcggctgaagggcaggcaaaaaaagccccgcacggtcggcgggggcaaagggtcagcgggaaggggattagcgggcgtcgggcttcttcatgcgtcggggccgcgcttcttgggatggagcacgacgaagcgcgcacgcgcatcgtcctcggccctatcggcccgcgtcgcggtcaggaacttgtcgcgcgctaggtcctccctggtgggcaccaggggcatgaactcggcctgctcgatgtaggtccactccatgaccgcatcgcagtcgaggccgcgttccttcaccgtctcttgcaggtcgcggtacgcccgctcgttgagcggctggtaacgggccaattggtcgtaaatggctgtcggccatgagcggcctttcctgttgagccagcagccgacgacgaagccggcaatgcaggcccctggcacaaccaggccgacgccgggggcaggggatggcagcagctcgccaaccaggaaccccgccgcgatgatgccgatgccggtcaaccagcccttgaaactatccggccccgaaacacccctgcgcattgcctggatgctgcgccggatagcttgcaacatcaggagccgtttcttttgttcgtcagtcatggtccgccctcaccagttgttcgtatcggtgtcggacgaactgaaatcgcaagagctgccggtatcggtccagccgctgtccgtgtcgctgctgccgaagcacggcgaggggtccgcgaacgccgcagacggcgtatccggccgcagcgcatcgcccagcatggccccggtcagcgagccgccggccaggtagcccagcatggtgctgttggtcgccccggccaccagggccgacgtgacgaaatcgccgtcattccctctggattgttcgctgctcggcggggcagtgcgccgcgccggcggcgtcgtggatggctcgggttggctggcctgcgacggccggcgaaaggtgcgcagcagctcgttatcgaccggctgcggcgtcggggccgccgccttgcgctgcggtcggtgttccttcttcggctcgcgcagcttgaacagcatgatcgcggaaaccagcagcaacgccgcgcctacgcctcccgcgatgtagaacagcatcggattcattcttcggtcctccttgtagcggaaccgttgtctgtgcggcgcgggtggcccgcgccgctgtctttggggatcagccctcgatgagcgcgaccagtttcacgtcggcaaggttcgcctcgaactcctggccgtcgtcctcgtacttcaaccaggcatagccttccgccggcggccgacggttgaggataaggcgggcagggcgctcgtcgtgctcgacctggacgatggcctttttcagcttgtccgggtccggctccttcgcgcccttttccttggcgtccttaccgtcctggtcgccgtcctcgccgtcctggccgtcgccggcctccgcgtcacgctcggcatcagtctggccgttgaaggcatcgacggtgttgggatcgcggcccttctcgtccaggaactcgcgcagcagcttgaccgtgccgcgcgtgatttcctgggtgtcgtcgtcaagccacgcctcgacttcctccgggcgcttcttgaaggccgtcaccagctcgttcaccacggtcacgtcgcgcacgcggccggtgttgaacgcatcggcgatcttctccggcaggtccagcagcgtgacgtgctgggtgatgaacgccggcgacttgccgatttccttggcgatatcgcctttcttcttgcccttcgccagctcgcggccaatgaagtcggcaatttcgcgcggggtcagctcgttgcgttgcaggttctcgataacctggtcggcttcgttgtagtcgttgtcgatgaacgccgggatggacttcttgccggcccacttcgagccacggtagcggcgggcgccgtgattgatgatatagcggcccggctgctcctggttctcgcgcaccgaaatgggtgacttcaccccgcgctctttgatcgtggcaccgatttccgcgatgctctccggggaaaagccggggttgtcggccgtccgcggctgatgcggatcttcgtcgatcaggtccaggtccagctcgatagggccggaaccgccctgagacgccgcaggagcgtccaggaggctcgacaggtcgccgatgctatccaaccccaggccggacggctgcgccgcgcctgcggcttcctgagcggccgcagcggtgtttttcttggtggtcttggcttgagccgcagtcattgggaaatctccatcttcgtgaacacgtaatcagccagggcgcgaacctctttcgatgccttgcgcgcggccgttttcttgatcttccagaccggcacaccggatgcgagggcatcggcgatgctgctgcgcaggccaacggtggccggaatcatcatcttggggtacgcggccagcagctcggcttggtggcgcgcgtggcgcggattccgcgcatcgaccttgctgggcaccatgccaaggaattgcagcttggcgttcttctggcgcacgttcgcaatggtcgtgaccatcttcttgatgccctggatgctgtacgcctcaagctcgatgggggacagcacatagtcggccgcgaagagggcggccgccaggccgacgccaagggtcggggccgtgtcgatcaggcacacgtcgaagccttggttcgccagggccttgatgttcgccccgaacagctcgcgggcgtcgtccagcgacagccgttcggcgttcgccagtaccgggttggactcgatgagggcgaggcgcgcggcctggccgtcgccggctgcgggtgcggtttcggtccagccgccggcagggacagcgccgaacagcttgcttgcatgcaggccggtagcaaagtccttgagcgtgtaggacgcattgccctgggggtccaggtcgatcacggcaacccgcaagccgcgctcgaaaaagtcgaaggcaagatgcacaagggtcgaagtcttgccgacgccgcctttctggttggccgtgaccaaagttttcatcgtttggtttcctgttttttcttggcgtccgcttcccacttccggacgatgtacgcctgatgttccggcagaaccgccgttacccgcgcgtacccctcgggcaagttcttgtcctcgaacgcggcccacacgcgatgcaccgcttgcgacactgcgcccctggtcagtcccagcgacgttgcgaacgtcgcctgtggcttcccatcgactaagacgccccgcgctatctcgatggtctgctgccccacttccagcccctggatcgcctcctggaactggctttcggtaagccgtttcttcatggataacacccataatttgctccgcgccttggttgaacatagcggtgacagccgccagcacatgagagaagtttagctaaacatttctcgcacgtcaacacctttagccgctaaaactcgtccttggcgtaacaaaacaaaagcccggaaaccgggctttcgtctcttgccgcttatggctctgcacccggctccatcaccaacaggtcgcgcacgcgcttcactcggttgcggatcgacactgccagcccaacaaagccggttgccgccgccgccaggatcgcgccgatgatgccggccacaccggccatcgcccaccaggtcgccgccttccggttccattcctgctggtactgcttcgcaatgctggacctcggctcaccataggctgaccgctcgatggcgtatgccgcttctccccttggcgtaaaacccagcgccgcaggcggcattgccatgctgcccgccgctttcccgaccacgacgcgcgcaccaggcttgcggtccagaccttcggccacggcgagctgcgcaaggacataatcagccgccgacttggctccacgcgcctcgatcagctcttgcactcgcgcgaaatccttggcctccacggccgccatgaatcgcgcacgcggcgaaggctccgcagggccggcgtcgtgatcgccgccgagaatgcccttcaccaagttcgacgacacgaaaatcatgctgacggctatcaccatcatgcagacggatcgcacgaacccgctgaattgaacacgagcacggcacccgcgaccactatgccaagaatgcccaaggtaaaaattgccggccccgccatgaagtccgtgaatgccccgacggccgaagtgaagggcaggccgccacccaggccgccgccctcactgcccggcacctggtcgctgaatgtcgatgccagcacctgcggcacgtcaatgcttccgggcgtcgcgctcgggctgatcgcccatcccgttactgccccgatcccggcaatggcaaggactgccagcgctgccatttttggggtgaggccgttcgcggccgaggggcgcagcccctggggggatgggaggcccgcgttagcgggccgggagggttcgagaagggggggcaccccccttcggcgtgcgcggtcacgcgcacagggcgcagccctggttaaaaacaaggtttataaatattggtttaaaagcaggttaaaagacaggttagcggtggccgaaaaacgggcggaaacccttgcaaatgctggattttctgcctgtggacagcccctcaaatgtcaataggtgcgcccctcatctgtcagcactctgcccctcaagtgtcaaggatcgcgcccctcatctgtcagtagtcgcgcccctcaagtgtcaataccgcagggcacttatccccaggcttgtccacatcatctgtgggaaactcgcgtaaaatcaggcgttttcgccgatttgcgaggctggccagctccacgtcgccggccgaaatcgagcctgcccctcatctgtcaacgccgcgccgggtgagtcggcccctcaagtgtcaacgtccgcccctcatctgtcagtgagggccaagttttccgcgaggtatccacaacgccggcggccgcggtgtctcgcacacggcttcgacggcgtttctggcgcgtttgcagggccatagacggccgccagcccagcggcgagggcaaccagcccggtgagcgtcggaaaggcgctggaagccccgtagcgacgcggagaggggcgagacaagccaagggcgcaggctcgatgcgcagcacgacatagccggttctcgcaaggacgagaatttccctgcggtgcccctcaagtgtcaatgaaagtttccaacgcgagccattcgcgagagccttgagtccacgctagatgagagctttgttgtaggtggaccagttggtgattttgaacttttgctttgccacggaacggtctgcgttgtcgggaagatgcgtgatctgatccttcaactcagcaaaagttcgatttattcaacaaagccacgttgtgtctcaaaatctctgatgttacattgcacaagataaaaatatatcatcatgaacaataaaactgtctgcttacataaacagtaatacaaggggtgttatgagccatattcaacgggaaacgtcttgctcgac

SEQ ID NO: 8 - DNA, 13019 bp, artificial sequence
  vector
gttacccggaccgaagcttagcccgggcatgcctgcagtgcagcgtgacccggtcgtgcccctctctagagataatgagcattgcatgtctaagttataaaaaattaccacatattttttttgtcacacttgtttgaagtgcagtttatctatctttatacatatatttaaactttactctacgaataatataatctatagtactacaataatatcagtgttttagagaatcatataaatgaacagttagacatggtctaaaggacaattgagtattttgacaacaggactctacagttttatctttttagtgtgcatgtgttctcctttttttttgcaaatagcttcacctatataatacttcatccattttattagtacatccatttagggtttagggttaatggtttttatagactaatttttttagtacatctattttattctattttagcctctaaattaagaaaactaaaactctattttagtttttttatttaataatttagatataaaatagaataaaataaagtgactaaaaattaaacaaataccctttaagaaattaaaaaaactaaggaaacatttttcttgtttcgagtagataatgccagcctgttaaacgccgtcgacgagtctaacggacaccaaccagcgaaccagcagcgtcgcgtcgggccaagcgaagcagacggcacggcatctctgtcgctgcctctggacccctctcgagagttccgctccaccgttggacttgctccgctgtcggcatccagaaattgcgtggcggagcggcagacgtgagccggcacggcaggcggcctcctcctcctctcacggcacggcagctacgggggattcctttcccaccgctccttcgctttcccttcctcgcccgccgtaataaatagacaccccctccacaccctctttccccaacctcgtgttgttcggagcgcacacacacacaaccagatctcccccaaatccacccgtcggcacctccgcttcaaggtacgccgctcgtcctccccccccccccctctctaccttctctagatcggcgttccggtccatggttagggcccggtagttctacttctgttcatgtttgtgttagatccgtgtttgtgttagatccgtgctgctagcgttcgtacacggatgcgacctgtacgtcagacacgttctgattgctaacttgccagtgtttctctttggggaatcctgggatggctctagccgttccgcagacgggatcgatttcatgattttttttgtttcgttgcatagggtttggtttgcccttttcctttatttcaatatatgccgtgcacttgtttgtcgggtcatcttttcatgcttttttttgtcttggttgtgatgatgtggtctggttgggcggtcgttctagatcggagtagaattctgtttcaaactacctggtggatttattaattttggatctgtatgtgtgtgccatacatattcatagttacgaattgaagatgatggatggaaatatcgatctaggataggtatacatgttgatgcgggttttactgatgcatatacagagatgctttttgttcgcttggttgtgatgatgtggtgtggttgggcggtcgttcattcgttctagatcggagtagaatactgtttcaaactacctggtgtatttattaattttggaactgtatgtgtgtgtcatacatcttcatagttacgagtttaagatggatggaaatatcgatctaggataggtatacatgttgatgtgggttttactgatgcatatacatgatggcatatgcagcatctattcatatgctctaaccttgagtacctatctattataataaacaagtatgttttataattattttgatcttgatatacttggatgatggcatatgcagcagctatatgtggatttttttagccctgccttcatacgctatttatttgcttggtactgtttcttttgtcgatgctcaccctgttgtttggtgttacttctgcaggtcgactctagaggatccacaagtttgtacaaaaaagctgaacgagaaacgtaaaatgatataaatatcaatatattaaattagattttgcataaaaaacagactacataatactgtaaaacacaacatatccagtcactatggcggccgcattaggcaccccaggctttacactttatgcttccggctcgtataatgtgtggattttgagttaggatttaaatacgcgttgatccggcttactaaaagccagataacagtatgcgtatttgcgcgctgatttttgcggtataagaatatatactgatatgtatacccgaagtatgtcaaaaagaggtatgctatgaagcagcgtattacagtgacagttgacagcgacagctatcagttgctcaaggcatatatgatgtcaatatctccggtctggtaagcacaaccatgcagaatgaagcccgtcgtctgcgtgccgaacgctggaaagcggaaaatcaggaagggatggctgaggtcgcccggtttattgaaatgaacggctcttttgctgacgagaacaggggctggtgaaatgcagtttaaggtttacacctataaaagagagagccgttatcgtctgtttgtggatgtacagagtgatatcattgacacgcccggtcgacggatggtgatccccctggccagtgcacgtctgctgtcagataaagtctcccgtgaactttacccggtggtgcatatcggggatgaaagctggcgcatgatgaccaccgatatggccagtgtgccggtctccgttatcggggaagaagtggctgatctcagccaccgcgaaaatgacatcaaaaacgccattaacctgatgttctggggaatataaatgtcaggctcccttatacacagccagtctgcaggtcgaccatagtgactggatatgttgtgttttacagtattatgtagtctgttttttatgcaaaatctaatttaatatattgatatttatatcattttacgtttctcgttcagctttcttgtacaaagtggtgttaacctagacttgtccatcttctggattggccaacttaattaatgtatgaaataaaaggatgcacacatagtgacatgctaatcactataatgtgggcatcaaagttgtgtgttatgtgtaattactagttatctgaataaaagagaaagagatcatccatatttcttatcctaaatgaatgtcacgtgtctttataattctttgatgaaccagatgcatttcattaaccaaatccatatacatataaatattaatcatatataattaatatcaattgggttagcaaaacaaatctagtctaggtgtgttttgcgaattgcggccgccaccgcggtggagctcgaattccggtccgggtcacctttgtccaccaagatggaactgcggccgctcattaattaagtcaggcgcgcctctagttgaagacacgttcatgtcttcatcgtaagaagacactcagtagtcttcggccagaatggccatctggattcagcaggcctagaaggccatttaaatcctgaggatctggtcttcctaaggacccgggatatcggaccgattaaactttaattcggtccgaagcttgcatgcctgcagtgcagcgtgacccggtcgtgcccctctctagagataatgagcattgcatgtctaagttataaaaaattaccacatattttttttgtcacacttgtttgaagtgcagtttatctatctttatacatatatttaaactttactctacgaataatataatctatagtactacaataatatcagtgttttagagaatcatataaatgaacagttagacatggtctaaaggacaattgagtattttgacaacaggactctacagttttatctttttagtgtgcatgtgttctcctttttttttgcaaatagcttcacctatataatacttcatccattttattagtacatccatttagggtttagggttaatggtttttatagactaatttttttagtacatctattttattctattttagcctctaaattaagaaaactaaaactctattttagtttttttatttaataatttagatataaaatagaataaaataaagtgactaaaaattaaacaaataccctttaagaaattaaaaaaactaaggaaacatttttcttgtttcgagtagataatgccagcctgttaaacgccgtcgacgagtctaacggacaccaaccagcgaaccagcagcgtcgcgtcgggccaagcgaagcagacggcacggcatctctgtcgctgcctctggacccctctcgagagttccgctccaccgttggacttgctccgctgtcggcatccagaaattgcgtggcggagcggcagacgtgagccggcacggcaggcggcctcctcctcctctcacggcaccggcagctacgggggattcctttcccaccgctccttcgctttcccttcctcgcccgccgtaataaatagacaccccctccacaccctctttccccaacctcgtgttgttcggagcgcacacacacacaaccagatctcccccaaatccacccgtcggcacctccgcttcaaggtacgccgctcgtcctcccccccccccctctctaccttctctagatcggcgttccggtccatgcatggttagggcccggtagttctacttctgttcatgtttgtgttagatccgtgtttgtgttagatccgtgctgctagcgttcgtacacggatgcgacctgtacgtcagacacgttctgattgctaacttgccagtgtttctctttggggaatcctgggatggctctagccgttccgcagacgggatcgatttcatgattttttttgtttcgttgcatagggtttggtttgcccttttcctttatttcaatatatgccgtgcacttgtttgtcgggtcatcttttcatgcttttttttgtcttggttgtgatgatgtggtctggttgggcggtcgttctagatcggagtagaattctgtttcaaactacctggtggatttattaattttggatctgtatgtgtgtgccatacatattcatagttacgaattgaagatgatggatggaaatatcgatctaggataggtatacatgttgatgcgggttttactgatgcatatacagagatgctttttgttcgcttggttgtgatgatgtggtgtggttgggcggtcgttcattcgttctagatcggagtagaatactgtttcaaactacctggtgtatttattaattttggaactgtatgtgtgtgtcatacatcttcatagttacgagtttaagatggatggaaatatcgatctaggataggtatacatgttgatgtgggttttactgatgcatatacatgatggcatatgcagcatctattcatatgctctaaccttgagtacctatctattataataaacaagtatgttttataattattttgatcttgatatacttggatgatggcatatgcagcagctatatgtggatttttttagccctgccttcatacgctatttatttgcttggtactgtttcttttgtcgatgctcaccctgttgtttggtgttacttctgcaggtcgactttaacttagcctaggatccacacgacaccatgtcccccgagcgccgccccgtcgagatccgcccggccaccgccgccgacatggccgccgtgtgcgacatcgtgaaccactacatcgagacctccaccgtgaacttccgcaccgagccgcagaccccgcaggagtggatcgacgacctggagcgcctccaggaccgctacccgtggctcgtggccgaggtggagggcgtggtggccggcatcgcctacgccggcccgtggaaggcccgcaacgcctacgactggaccgtggagtccaccgtgtacgtgtcccaccgccaccagcgcctcggcctcggctccaccctctacacccacctcctcaagagcatggaggcccagggcttcaagtccgtggtggccgtgatcggcctcccgaacgacccgtccgtgcgcctccacgaggccctcggctacaccgcccgcggcaccctccgcgccgccggctacaagcacggcggctggcacgacgtcggcttctggcagcgcgacttcgagctgccggccccgccgcgcccggtgcgcccggtgacgcagatctgagtcgaaacctagacttgtccatcttctggattggccaacttaattaatgtatgaaataaaaggatgcacacatagtgacatgctaatcactataatgtgggcatcaaagttgtgtgttatgtgtaattactagttatctgaataaaagagaaagagatcatccatatttcttatcctaaatgaatgtcacgtgtctttataattctttgatgaaccagatgcatttcattaaccaaatccatatacatataaatattaatcatatataattaatatcaattgggttagcaaaacaaatctagtctaggtgtgttttgcgaattgcggccgccaccgcggtggagctcgaattcattccgattaatcgtggcctcttgctcttcaggatgaagagctatgtttaaacgtgcaagcgctactagacaattcagtacattaaaaacgtccgcaatgtgttattaagttgtctaagcgtcaatttgtttacaccacaatatatcctgccaccagccagccaacagctccccgaccggcagctcggcacaaaatcaccactcgatacaggcagcccatcagtccgggacggcgtcagcgggagagccgttgtaaggcggcagactttgctcatgttaccgatgctattcggaagaacggcaactaagctgccgggtttgaaacacggatgatctcgcggagggtagcatgttgattgtaacgatgacagagcgttgctgcctgtgatcaaatatcatctccctcgcagagatccgaattatcagccttcttattcatttctcgcttaaccgtgacaggctgtcgatcttgagaactatgccgacataataggaaatcgctggataaagccgctgaggaagctgagtggcgctatttctttagaagtgaacgttgacgatcgtcgaccgtaccccgatgaattaattcggacgtacgttctgaacacagctggatacttacttgggcgattgtcatacatgacatcaacaatgtacccgtttgtgtaaccgtctcttggaggttcgtatgacactagtggttcccctcagcttgcgactagatgttgaggcctaacattttattagagagcaggctagttgcttagatacatgatcttcaggccgttatctgtcagggcaagcgaaaattggccatttatgacgaccaatgccccgcagaagctcccatctttgccgccatagacgccgcgccccccttttggggtgtagaacatccttttgccagatgtggaaaagaagttcgttgtcccattgttggcaatgacgtagtagccggcgaaagtgcgagacccatttgcgctatatataagcctacgatttccgttgcgactattgtcgtaattggatgaactattatcgtagttgctctcagagttgtcgtaatttgatggactattgtcgtaattgcttatggagttgtcgtagttgcttggagaaatgtcgtagttggatggggagtagtcatagggaagacgagcttcatccactaaaacaattggcaggtcagcaagtgcctgccccgatgccatcgcaagtacgaggcttagaaccaccttcaacagatcgcgcatagtcttccccagctctctaacgcttgagttaagccgcgccgcgaagcggcgtcggcttgaacgaattgttagacattatttgccgactaccttggtgatctcgcctttcacgtagtgaacaaattcttccaactgatctgcgcgcgaggccaagcgatcttcttgtccaagataagcctgcctagcttcaagtatgacgggctgatactgggccggcaggcgctccattgcccagtcggcagcgacatccttcggcgcgattttgccggttactgcgctgtaccaaatgcgggacaacgtaagcactacatttcgctcatcgccagcccagtcgggcggcgagttccatagcgttaaggtttcatttagcgcctcaaatagatcctgttcaggaaccggatcaaagagttcctccgccgctggacctaccaaggcaacgctatgttctcttgcttttgtcagcaagatagccagatcaatgtcgatcgtggctggctcgaagatacctgcaagaatgtcattgcgctgccattctccaaattgcagttcgcgcttagctggataacgccacggaatgatgtcgtcgtgcacaacaatggtgacttctacagcgcggagaatctcgctctctccaggggaagccgaagtttccaaaaggtcgttgatcaaagctcgccgcgttgtttcatcaagccttacagtcaccgtaaccagcaaatcaatatcactgtgtggcttcaggccgccatccactgcggagccgtacaaatgtacggccagcaacgtcggttcgagatggcgctcgatgacgccaactacctctgatagttgagtcgatacttcggcgatcaccgcttccctcatgatgtttaactcctgaattaagccgcgccgcgaagcggtgtcggcttgaatgaattgttaggcgtcatcctgtgctcccgagaaccagtaccagtacatcgctgtttcgttcgagacttgaggtctagttttatacgtgaacaggtcaatgccgccgagagtaaagccacattttgcgtacaaattgcaggcaggtacattgttcgtttgtgtctctaatcgtatgccaaggagctgtctgcttagtgcccactttttcgcaaattcgatgagactgtgcgcgactcctttgcctcggtgcgtgtgcgacacaacaatgtgttcgatagaggctagatcgttccatgttgagttgagttcaatcttcccgacaagctcttggtcgatgaatgcgccatagcaagcagagtcttcatcagagtcatcatccgagatgtaatccttccggtaggggctcacacttctggtagatagttcaaagccttggtcggataggtgcacatcgaacacttcacgaacaatgaaatggttctcagcatccaatgtttccgccacctgctcagggatcaccgaaatcttcatatgacgcctaacgcctggcacagcggatcgcaaacctggcgcggcttttggcacaaaaggcgtgacaggtttgcgaatccgttgctgccacttgttaacccttttgccagatttggtaactataatttatgttagaggcgaagtcttgggtaaaaactggcctaaaattgctggggatttcaggaaagtaaacatcaccttccggctcgatgtctattgtagatatatgtagtgtatctacttgatcgggggatctgctgcctcgcgcgtttcggtgatgacggtgaaaacctctgacacatgcagctcccggagacggtcacagcttgtctgtaagcggatgccgggagcagacaagcccgtcagggcgcgtcagcgggtgttggcgggtgtcggggcgcagccatgacccagtcacgtagcgatagcggagtgtatactggcttaactatgcggcatcagagcagattgtactgagagtgcaccatatgcggtgtgaaataccgcacagatgcgtaaggagaaaataccgcatcaggcgctcttccgcttcctcgctcactgactcgctgcgctcggtcgttcggctgcggcgagcggtatcagctcactcaaaggcggtaatacggttatccacagaatcaggggataacgcaggaaagaacatgtgagcaaaaggccagcaaaaggccaggaaccgtaaaaaggccgcgttgctggcgtttttccataggctccgcccccctgacgagcatcacaaaaatcgacgctcaagtcagaggtggcgaaacccgacaggactataaagataccaggcgtttccccctggaagctccctcgtgcgctctcctgttccgaccctgccgcttaccggatacctgtccgcctttctcccttcgggaagcgtggcgctttctcatagctcacgctgtaggtatctcagttcggtgtaggtcgttcgctccaagctgggctgtgtgcacgaaccccccgttcagcccgaccgctgcgccttatccggtaactatcgtcttgagtccaacccggtaagacacgacttatcgccactggcagcagccactggtaacaggattagcagagcgaggtatgtaggcggtgctacagagttcttgaagtggtggcctaactacggctacactagaaggacagtatttggtatctgcgctctgctgaagccagttaccttcggaaaaagagttggtagctcttgatccggcaaacaaaccaccgctggtagcggtggtttttttgtttgcaagcagcagattacgcgcagaaaaaaaggatctcaagaagatcctttgatcttttctacggggtctgacgctcagtggaacgaaaactcacgttaagggattttggtcatgagattatcaaaaaggatcttcacctagatccttttaaattaaaaatgaagttttaaatcaatctaaagtatatatgagtaaacttggtctgacagttaccaatgcttaatcagtgaggcacctatctcagcgatctgtctatttcgttcatccatagttgcctgactccccgtcgtgtagataactacgatacgggagggcttaccatctggccccagtgctgcaatgataccgcgagacccacgctcaccggctccagatttatcagcaataaaccagccagccggaagggccgagcgcagaagtggtcctgcaactttatccgcctccatccagtctattaattgttgccgggaagctagagtaagtagttcgccagttaatagtttgcgcaacgttgttgccattgctgcagggggggggggggggggggacttccattgttcattccacggacaaaaacagagaaaggaaacgacagaggccaaaaagcctcgctttcagcacctgtcgtttcctttcttttcagagggtattttaaataaaaacattaagttatgacgaagaagaacggaaacgccttaaaccggaaaattttcataaatagcgaaaacccgcgaggtcgccgccccgtaacctgtcggatcaccggaaaggacccgtaaagtgataatgattatcatctacatatcacaacgtgcgtggaggccatcaaaccacgtcaaataatcaattatgacgcaggtatcgtattaattgatctgcatcaacttaacgtaaaaacaacttcagacaatacaaatcagcgacactgaatacggggcaacctcatgtcccccccccccccccccctgcaggcatcgtggtgtcacgctcgtcgtttggtatggcttcattcagctccggttcccaacgatcaaggcgagttacatgatcccccatgttgtgcaaaaaagcggttagctccttcggtcctccgatcgttgtcagaagtaagttggccgcagtgttatcactcatggttatggcagcactgcataattctcttactgtcatgccatccgtaagatgcttttctgtgactggtgagtactcaaccaagtcattctgagaatagtgtatgcggcgaccgagttgctcttgcccggcgtcaacacgggataataccgcgccacatagcagaactttaaaagtgctcatcattggaaaacgttcttcggggcgaaaactctcaaggatcttaccgctgttgagatccagttcgatgtaacccactcgtgcacccaactgatcttcagcatcttttactttcaccagcgtttctgggtgagcaaaaacaggaaggcaaaatgccgcaaaaaagggaataagggcgacacggaaatgttgaatactcatactcttcctttttcaatattattgaagcatttatcagggttattgtctcatgagcggatacatatttgaatgtatttagaaaaataaacaaataggggttccgcgcacatttccccgaaaagtgccacctgacgtctaagaaaccattattatcatgacattaacctataaaaataggcgtatcacgaggccctttcgtcttcaagaattggtcgacgatcttgctgcgttcggatattttcgtggagttcccgccacagacccggattgaaggcgagatccagcaactcgcgccagatcatcctgtgacggaactttggcgcgtgatgactggccaggacgtcggccgaaagagcgacaagcagatcacgcttttcgacagcgtcggatttgcgatcgaggatttttcggcgctgcgctacgtccgcgaccgcgttgagggatcaagccacagcagcccactcgaccttctagccgacccagacgagccaagggatctttttggaatgctgctccgtcgtcaggctttccgacgtttgggtggttgaacagaagtcattatcgtacggaatgccaagcactcccgaggggaaccctgtggttggcatgcacatacaaatggacgaacggataaaccttttcacgcccttttaaatatccgttattctaataaacgctcttttctcttaggtttacccgccaatatatcctgtcaaacactgatagtttaaactgaaggcgggaaacgacaatctgatcatgagcggagaattaagggagtcacgttatgacccccgccgatgacgcgggacaagccgttttacgtttggaactgacagaaccgcaacgttgaaggagccactcagcaagctggtacgattgtaatacgactcactatagggcgaattgagcgctgtttaaacgctcttcaactggaagagcg

SEQ ID NO: 9 - DNA, 2991 bp, artificial sequence
  vector
ctttcctgcgttatcccctgattctgtggataaccgtattaccgcctttgagtgagctgataccgctcgccgcagccgaacgaccgagcgcagcgagtcagtgagcgaggaagcggaagagcgcccaatacgcaaaccgcctctccccgcgcgttggccgattcattaatgcagctggcacgacaggtttcccgactggaaagcgggcagtgagcgcaacgcaattaatacgcgtaccgctagccaggaagagtttgtagaaacgcaaaaaggccatccgtcaggatggccttctgcttagtttgatgcctggcagtttatggcgggcgtcctgcccgccaccctccgggccgttgcttcacaacgttcaaatccgctcccggcggatttgtcctactcaggagagcgttcaccgacaaacaacagataaaacgaaaggcccagtcttccgactgagcctttcgttttatttgatgcctggcagttccctactctcgcgttaacgctagcatggatgttttcccagtcacgacgttgtaaaacgacggccagtcttaagctcgggccctgcagctctagagctcgaattctacaggtcactaataccatctaagtagttggttcatagtgactgcatatgttgtgttttacagtattatgtagtctgttttttatgcaaaatctaatttaatatattgatatttatatcattttacgtttctcgttcaactttcttgtacaaagtggccgttaacggatccagacttgtccatcttctggattggccaacttaattaatgtatgaaataaaaggatgcacacatagtgacatgctaatcactataatgtgggcatcaaagttgtgtgttatgtgtaattactagttatctgaataaaagagaaagagatcatccatatttcttatcctaaatgaatgtcacgtgtctttataattctttgatgaaccagatgcatttcattaaccaaatccatatacatataaatattaatcatatataattaatatcaattgggttagcaaaacaaatctagtctaggtgtgttttgcgaattgcggcaagcttgcggccgccccgggcaactttattatacaaagttggcattataaaaaagcattgcttatcaatttgttgcaacgaacaggtcactatcagtcaaaataaaatcattatttggagctccatggtagcgttaacgcggccgcgatatcccctatagtgagtcgtattacatggtcatagctgtttcctggcagctctggcccgtgtctcaaaatctctgatgttacattgcacaagataaaaatatatcatcatgaacaataaaactgtctgcttacataaacagtaatacaaggggtgttatgagccatattcaacgggaaacgtcgaggccgcgattaaattccaacatggatgctgatttatatgggtataaatgggctcgcgataatgtcgggcaatcaggtgcgacaatctatcgcttgtatgggaagcccgatgcgccagagttgtttctgaaacatggcaaaggtagcgttgccaatgatgttacagatgagatggtcagactaaactggctgacggaatttatgcctcttccgaccatcaagcattttatccgtactcctgatgatgcatggttactcaccactgcgatccccggaaaaacagcattccaggtattagaagaatatcctgattcaggtgaaaatattgttgatgcgctggcagtgttcctgcgccggttgcattcgattcctgtttgtaattgtccttttaacagcgatcgcgtatttcgtctcgctcaggcgcaatcacgaatgaataacggtttggttgatgcgagtgattttgatgacgagcgtaatggctggcctgttgaacaagtctggaaagaaatgcataaacttttgccattctcaccggattcagtcgtcactcatggtgatttctcacttgataaccttatttttgacgaggggaaattaataggttgtattgatgttggacgagtcggaatcgcagaccgataccaggatcttgccatcctatggaactgcctcggtgagttttctccttcattacagaaacggctttttcaaaaatatggtattgataatcctgatatgaataaattgcagtttcatttgatgctcgatgagtttttctaatcagaattggttaattggttgtaacactggcagagcattacgctgacttgacgggacggcgcaagctcatgaccaaaatcccttaacgtgagttacgcgtcgttccactgagcgtcagaccccgtagaaaagatcaaaggatcttcttgagatcctttttttctgcgcgtaatctgctgcttgcaaacaaaaaaaccaccgctaccagcggtggtttgtttgccggatcaagagctaccaactctttttccgaaggtaactggcttcagcagagcgcagataccaaatactgtccttctagtgtagccgtagttaggccaccacttcaagaactctgtagcaccgcctacatacctcgctctgctaatcctgttaccagtggctgctgccagtggcgataagtcgtgtcttaccgggttggactcaagacgatagttaccggataaggcgcagcggtcgggctgaacggggggttcgtgcacacagcccagcttggagcgaacgacctacaccgaactgagatacctacagcgtgagcattgagaaagcgccacgcttcccgaagggagaaaggcggacaggtatccggtaagcggcagggtcggaacaggagagcgcacgagggagcttccagggggaaacgcctggtatctttatagtcctgtcgggtttcgccacctctgacttgagcgtcgatttttgtgatgctcgtcaggggggcggagcctatggaaaaacgccagcaacgcggcctttttacggttcctggccttttgctggccttttgctcacatgtt

SEQ ID NO: 10 - DNA, 13807 bp, artificial sequence
  vector
aagctggtacgattgtaatacgactcactatagggcgaattgagcgctgtttaaacgctcttcaactggaagagcggttaccagagctggtcacctttgtccaccaagatggaactgcggccgctcattaattaagtcaggcgcgcctctagttgaagacacgttcatgtcttcatcgtaagaagacactcagtagtcttcggccagaatggccgtaggtgaattaagaggagagaggaggtaaacattttcttctattttttcatattttcaggataaattattgtaaaagtttacaagatttccatttgactagtgtaaatgaggaatattctctagtaagatcattatttcatctacttcttttatcttctaccagtagaggaataaacaatatttagctcctttgtaaatacaaattaattttcgttcttgacatcattcaattttaattttacgtataaaataaaagatcatacctattagaacgattaaggagaaatacaattcgaatgagaaggatgtgccgtttgttataataaacagccacacgacgtaaacgtaaaatgaccacatgatgggccaatagacatggaccgactactaataatagtaagttacattttaggatggaataaatatcataccgacatcagtttgaaagaaaagggaaaaaaagaaaaaataaataaaagatatactaccgacatgagttccaaaaagcaaaaaaaaagatcaagccgacacagacacgcgtagagagcaaaatgactttgacgtcacaccacgaaaacagacgcttcatacgtgtccctttatctctctcagtctctctataaacttagtgagaccctcctctgttttactcaggatccccgggtaccgagctcgaattcaccggtcgccaccatggcccacagcaagcacggcctgaaggaggagatgaccatgaagtaccacatggagggctgcgtgaacggccacaagttcgtgatcaccggcgagggcatcggctaccccttcaagggcaagcagaccatcaacctgtgcgtgatcgagggcggccccctgcccttcagcgaggacatcctgagcgccggcttcaagtacggcgaccggatcttcaccgagtacccccaggacatcgtggactacttcaagaacagctgccccgccggctacacctggggccggagcttcctgttcgaggacggcgccgtgtgcatctgtaacgtggacatcaccgtgagcgtgaaggagaactgcatctaccacaagagcatcttcaacggcgtgaacttccccgccgacggccccgtgatgaagaagatgaccaccaactgggaggccagctgcgagaagatcatgcccgtgcctaagcagggcatcctgaagggcgacgtgagcatgtacctgctgctgaaggacggcggccggtaccggtgccagttcgacaccgtgtacaaggccaagagcgtgcccagcaagatgcccgagtggcacttcatccagcacaagctgctgcgggaggaccggagcgacgccaagaaccagaagtggcagctgaccgagcacgccatcgccttccccagcgccctggcctgaagcggcccatggatattcgaacgcgtaggtaccacatggttaacctagacttgtccatcttctggattggccaacttaattaatgtatgaaataaaaggatgcacacatagtgacatgctaatcactataatgtgggcatcaaagttgtgtgttatgtgtaattactagttatctgaataaaagagaaagagatcatccatatttcttatcctaaatgaatgtcacgtgtctttataattctttgatgaaccagatgcatttcattaaccaaatccatatacatataaatattaatcatatataattaatatcaattgggttagcaaaacaaatctagtctaggtgtgttttgcgaatgcggccattggcctagaaggccatttaaatcctgaggatctggtcttcctaaggacccgggatatcgctatcaactttgtatagaaaagttgaacgagaaacgtaaaatgatataaatatcaatatattaaattagattttgcataaaaaacagactacataatactgtaaaacacaacatatccagtcactatggtcgacctgcagactggctgtgtataagggagcctgacatttatattccccagaacatcaggttaatggcgtttttgatgtcattttcgcggtggctgagatcagccacttcttccccgataacggagaccggcacactggccatatcggtggtcatcatgcgccagctttcatccccgatatgcaccaccgggtaaagttcacgggggactttatctgacagcagacgtgcactggccagggggatcaccatccgtcgcccgggcgtgtcaataatatcactctgtacatccacaaacagacgataacggctctctcttttataggtgtaaaccttaaactgcatttcaccagcccctgttctcgtcggcaaaagagccgttcatttcaataaaccgggcgacctcagccatcccttcctgattttccgctttccagcgttcggcacgcagacgacgggcttcattctgcatggttgtgcttaccgaaccggagatattgacatcatatatgccttgagcaactgatagctgtcgctgtcaactgtcactgtaatacgctgcttcatagcatacctctttttgacatacttcgggtatacatatcagtatatattcttataccgcaaaaatcagcgcgcaaatacgcatactgttatctggcttttagtaagccggatcctctagattacgccccgcctgccactcatcgcagtactgttgtaattcattaagcattctgccgacatggaagccatcacaaacggcatgatgaacctgaatcgccagcggcatcagcaccttgtcgccttgcgtataatatttgcccatggtgaaaacgggggcgaagaagttgtccatattggccacgtttaaatcaaaactggtgaaactcacccagggattggctgagacgaaaaacatattctcaataaaccctttagggaaataggccaggttttcaccgtaacacgccacatcttgcgaatatatgtgtagaaactgccggaaatcgtcgtggtattcactccagagcgatgaaaacgtttcagtttgctcatggaaaacggtgtaacaagggtgaacactatcccatatcaccagctcaccgtctttcattgccatacggaattccggatgagcattcatcaggcgggcaagaatgtgaataaaggccggataaaacttgtgcttatttttctttacggtctttaaaaaggccgtaatatccagctgaacggtctggttataggtacattgagcaactgactgaaatgcctcaaaatgttctttacgatgccattgggatatatcaacggtggtatatccagtgatttttttctccattttagcttccttagctcctgaaaatctcgacggatcctaactcaaaatccacacattatacgagccggaagcataaagtgtaaagcctggggtgccctaatgcggccgccatagtgactggatatgttgtgttttacagtattatgtagtctgttttttatgcaaaatctaatttaatatattgatatttatatcattttacgtttctcgttcaactttattatacaaagttgatagatatcggaccgattaaactttaattcggtccgaagcttgcatgcctgcagtgcagcgtgacccggtcgtgcccctctctagagataatgagcattgcatgtctaagttataaaaaattaccacatattttttttgtcacacttgtttgaagtgcagtttatctatctttatacatatatttaaactttactctacgaataatataatctatagtactacaataatatcagtgttttagagaatcatataaatgaacagttagacatggtctaaaggacaattgagtattttgacaacaggactctacagttttatctttttagtgtgcatgtgttctcctttttttttgcaaatagcttcacctatataatacttcatccattttattagtacatccatttagggtttagggttaatggtttttatagactaatttttttagtacatctattttattctattttagcctctaaattaagaaaactaaaactctattttagtttttttatttaataatttagatataaaatagaataaaataaagtgactaaaaattaaacaaataccctttaagaaattaaaaaaactaaggaaacatttttcttgtttcgagtagataatgccagcctgttaaacgccgtcgacgagtctaacggacaccaaccagcgaaccagcagcgtcgcgtcgggccaagcgaagcagacggcacggcatctctgtcgctgcctctggacccctctcgagagttccgctccaccgttggacttgctccgctgtcggcatccagaaattgcgtggcggagcggcagacgtgagccggcacggcaggcggcctcctcctcctctcacggcaccggcagctacgggggattcctttcccaccgctccttcgctttcccttcctcgcccgccgtaataaatagacaccccctccacaccctctttccccaacctcgtgttgttcggagcgcacacacacacaaccagatctcccccaaatccacccgtcggcacctccgcttcaaggtacgccgctcgtcctcccccccccccctctctaccttctctagatcggcgttccggtccatgcatggttagggcccggtagttctacttctgttcatgtttgtgttagatccgtgtttgtgttagatccgtgctgctagcgttcgtacacggatgcgacctgtacgtcagacacgttctgattgctaacttgccagtgtttctctttggggaatcctgggatggctctagccgttccgcagacgggatcgatttcatgattttttttgtttcgttgcatagggtttggtttgcccttttcctttatttcaatatatgccgtgcacttgtttgtcgggtcatcttttcatgcttttttttgtcttggttgtgatgatgtggtctggttgggcggtcgttctagatcggagtagaattctgtttcaaactacctggtggatttattaattttggatctgtatgtgtgtgccatacatattcatagttacgaattgaagatgatggatggaaatatcgatctaggataggtatacatgttgatgcgggttttactgatgcatatacagagatgctttttgttcgcttggttgtgatgatgtggtgtggttgggcggtcgttcattcgttctagatcggagtagaatactgtttcaaactacctggtgtatttattaattttggaactgtatgtgtgtgtcatacatcttcatagttacgagtttaagatggatggaaatatcgatctaggataggtatacatgttgatgtgggttttactgatgcatatacatgatggcatatgcagcatctattcatatgctctaaccttgagtacctatctattataataaacaagtatgttttataattattttgatcttgatatacttggatgatggcatatgcagcagctatatgtggatttttttagccctgccttcatacgctatttatttgcttggtactgtttcttttgtcgatgctcaccctgttgtttggtgttacttctgcaggtcgactttaacttagcctaggatccacacgacaccatgtcccccgagcgccgccccgtcgagatccgcccggccaccgccgccgacatggccgccgtgtgcgacatcgtgaaccactacatcgagacctccaccgtgaacttccgcaccgagccgcagaccccgcaggagtggatcgacgacctggagcgcctccaggaccgctacccgtggctcgtggccgaggtggagggcgtggtggccggcatcgcctacgccggcccgtggaaggcccgcaacgcctacgactggaccgtggagtccaccgtgtacgtgtcccaccgccaccagcgcctcggcctcggctccaccctctacacccacctcctcaagagcatggaggcccagggcttcaagtccgtggtggccgtgatcggcctcccgaacgacccgtccgtgcgcctccacgaggccctcggctacaccgcccgcggcaccctccgcgccgccggctacaagcacggcggctggcacgacgtcggcttctggcagcgcgacttcgagctgccggccccgccgcgcccggtgcgcccggtgacgcagatctccggtggaggcggcagcggtggcggaggctccggaggcggtggctccatggcctcctccgaggacgtcatcaaggagttcatgcgcttcaaggtgcgcatggagggctccgtgaacggccacgagttcgagatcgagggcgagggcgagggccgcccctacgagggcacccagaccgccaagctgaaggtgaccaagggcggccccctgcccttcgcctgggacatcctgtccccccagttccagtacggctccaaggtgtacgtgaagcaccccgccgacatccccgactacaagaagctgtccttccccgagggcttcaagtgggagcgcgtgatgaacttcgaggacggcggcgtggtgaccgtgacccaggactcctccctgcaggacggctccttcatctacaaggtgaagttcatcggcgtgaacttcccctccgacggccccgtaatgcagaagaagactatgggctgggaggcctccaccgagcgcctgtacccccgcgacggcgtgctgaagggcgagatccacaaggccctgaagctgaaggacggcggccactacctggtggagttcaagtccatctacatggccaagaagcccgtgcagctgcccggctactactacgtggactccaagctggacatcacctcccacaacgaggactacaccatcgtggagcagtacgagcgcgccgagggccgccaccacctgttcctgtagtcaggatctgagtcgaaacctagacttgtccatcttctggattggccaacttaattaatgtatgaaataaaaggatgcacacatagtgacatgctaatcactataatgtgggcatcaaagttgtgtgttatgtgtaattactagttatctgaataaaagagaaagagatcatccatatttcttatcctaaatgaatgtcacgtgtctttataattctttgatgaaccagatgcatttcattaaccaaatccatatacatataaatattaatcatatataattaatatcaattgggttagcaaaacaaatctagtctaggtgtgttttgcgaatgcggccgccaccgcggtggagctcgaattcattccgattaatcgtggcctcttgctcttcaggatgaagagctatgtttaaacgtgcaagcgctactagacaattcagtacattaaaaacgtccgcaatgtgttattaagttgtctaagcgtcaatttgtttacaccacaatatatcctgccaccagccagccaacagctccccgaccggcagctcggcacaaaatcaccactcgatacaggcagcccatcagtccgggacggcgtcagcgggagagccgttgtaaggcggcagactttgctcatgttaccgatgctattcggaagaacggcaactaagctgccgggtttgaaacacggatgatctcgcggagggtagcatgttgattgtaacgatgacagagcgttgctgcctgtgatcaaatatcatctccctcgcagagatccgaattatcagccttcttattcatttctcgcttaaccgtgacaggctgtcgatcttgagaactatgccgacataataggaaatcgctggataaagccgctgaggaagctgagtggcgctatttctttagaagtgaacgttgacgatcgtcgaccgtaccccgatgaattaattcggacgtacgttctgaacacagctggatacttacttgggcgattgtcatacatgacatcaacaatgtacccgtttgtgtaaccgtctcttggaggttcgtatgacactagtggttcccctcagcttgcgactagatgttgaggcctaacattttattagagagcaggctagttgcttagatacatgatcttcaggccgttatctgtcagggcaagcgaaaattggccatttatgacgaccaatgccccgcagaagctcccatctttgccgccatagacgccgcgccccccttttggggtgtagaacatccttttgccagatgtggaaaagaagttcgttgtcccattgttggcaatgacgtagtagccggcgaaagtgcgagacccatttgcgctatatataagcctacgatttccgttgcgactattgtcgtaattggatgaactattatcgtagttgctctcagagttgtcgtaatttgatggactattgtcgtaattgcttatggagttgtcgtagttgcttggagaaatgtcgtagttggatggggagtagtcatagggaagacgagcttcatccactaaaacaattggcaggtcagcaagtgcctgccccgatgccatcgcaagtacgaggcttagaaccaccttcaacagatcgcgcatagtcttccccagctctctaacgcttgagttaagccgcgccgcgaagcggcgtcggcttgaacgaattgttagacattatttgccgactaccttggtgatctcgcctttcacgtagtgaacaaattcttccaactgatctgcgcgcgaggccaagcgatcttcttgtccaagataagcctgcctagcttcaagtatgacgggctgatactgggccggcaggcgctccattgcccagtcggcagcgacatccttcggcgcgattttgccggttactgcgctgtaccaaatgcgggacaacgtaagcactacatttcgctcatcgccagcccagtcgggcggcgagttccatagcgttaaggtttcatttagcgcctcaaatagatcctgttcaggaaccggatcaaagagttcctccgccgctggacctaccaaggcaacgctatgttctcttgcttttgtcagcaagatagccagatcaatgtcgatcgtggctggctcgaagatacctgcaagaatgtcattgcgctgccattctccaaattgcagttcgcgcttagctggataacgccacggaatgatgtcgtcgtgcacaacaatggtgacttctacagcgcggagaatctcgctctctccaggggaagccgaagtttccaaaaggtcgttgatcaaagctcgccgcgttgtttcatcaagccttacagtcaccgtaaccagcaaatcaatatcactgtgtggcttcaggccgccatccactgcggagccgtacaaatgtacggccagcaacgtcggttcgagatggcgctcgatgacgccaactacctctgatagttgagtcgatacttcggcgatcaccgcttccctcatgatgtttaactcctgaattaagccgcgccgcgaagcggtgtcggcttgaatgaattgttaggcgtcatcctgtgctcccgagaaccagtaccagtacatcgctgtttcgttcgagacttgaggtctagttttatacgtgaacaggtcaatgccgccgagagtaaagccacattttgcgtacaaattgcaggcaggtacattgttcgtttgtgtctctaatcgtatgccaaggagctgtctgcttagtgcccactttttcgcaaattcgatgagactgtgcgcgactcctttgcctcggtgcgtgtgcgacacaacaatgtgttcgatagaggctagatcgttccatgttgagttgagttcaatcttcccgacaagctcttggtcgatgaatgcgccatagcaagcagagtcttcatcagagtcatcatccgagatgtaatccttccggtaggggctcacacttctggtagatagttcaaagccttggtcggataggtgcacatcgaacacttcacgaacaatgaaatggttctcagcatccaatgtttccgccacctgctcagggatcaccgaaatcttcatatgacgcctaacgcctggcacagcggatcgcaaacctggcgcggcttttggcacaaaaggcgtgacaggtttgcgaatccgttgctgccacttgttaacccttttgccagatttggtaactataatttatgttagaggcgaagtcttgggtaaaaactggcctaaaattgctggggatttcaggaaagtaaacatcaccttccggctcgatgtctattgtagatatatgtagtgtatctacttgatcgggggatctgctgcctcgcgcgtttcggtgatgacggtgaaaacctctgacacatgcagctcccggagacggtcacagcttgtctgtaagcggatgccgggagcagacaagcccgtcagggcgcgtcagcgggtgttggcgggtgtcggggcgcagccatgacccagtcacgtagcgatagcggagtgtatactggcttaactatgcggcatcagagcagattgtactgagagtgcaccatatgcggtgtgaaataccgcacagatgcgtaaggagaaaataccgcatcaggcgctcttccgcttcctcgctcactgactcgctgcgctcggtcgttcggctgcggcgagcggtatcagctcactcaaaggcggtaatacggttatccacagaatcaggggataacgcaggaaagaacatgtgagcaaaaggccagcaaaaggccaggaaccgtaaaaaggccgcgttgctggcgtttttccataggctccgcccccctgacgagcatcacaaaaatcgacgctcaagtcagaggtggcgaaacccgacaggactataaagataccaggcgtttccccctggaagctccctcgtgcgctctcctgttccgaccctgccgcttaccggatacctgtccgcctttctcccttcgggaagcgtggcgctttctcatagctcacgctgtaggtatctcagttcggtgtaggtcgttcgctccaagctgggctgtgtgcacgaaccccccgttcagcccgaccgctgcgccttatccggtaactatcgtcttgagtccaacccggtaagacacgacttatcgccactggcagcagccactggtaacaggattagcagagcgaggtatgtaggcggtgctacagagttcttgaagtggtggcctaactacggctacactagaaggacagtatttggtatctgcgctctgctgaagccagttaccttcggaaaaagagttggtagctcttgatccggcaaacaaaccaccgctggtagcggtggtttttttgtttgcaagcagcagattacgcgcagaaaaaaaggatctcaagaagatcctttgatcttttctacggggtctgacgctcagtggaacgaaaactcacgttaagggattttggtcatgagattatcaaaaaggatcttcacctagatccttttaaattaaaaatgaagttttaaatcaatctaaagtatatatgagtaaacttggtctgacagttaccaatgcttaatcagtgaggcacctatctcagcgatctgtctatttcgttcatccatagttgcctgactccccgtcgtgtagataactacgatacgggagggcttaccatctggccccagtgctgcaatgataccgcgagacccacgctcaccggctccagatttatcagcaataaaccagccagccggaagggccgagcgcagaagtggtcctgcaactttatccgcctccatccagtctattaattgttgccgggaagctagagtaagtagttcgccagttaatagtttgcgcaacgttgttgccattgctgcagggggggggggggggggggacttccattgttcattccacggacaaaaacagagaaaggaaacgacagaggccaaaaagcctcgctttcagcacctgtcgtttcctttcttttcagagggtattttaaataaaaacattaagttatgacgaagaagaacggaaacgccttaaaccggaaaattttcataaatagcgaaaacccgcgaggtcgccgccccgtaacctgtcggatcaccggaaaggacccgtaaagtgataatgattatcatctacatatcacaacgtgcgtggaggccatcaaaccacgtcaaataatcaattatgacgcaggtatcgtattaattgatctgcatcaacttaacgtaaaaacaacttcagacaatacaaatcagcgacactgaatacggggcaacctcatgtcccccccccccccccccctgcaggcatcgtggtgtcacgctcgtcgtttggtatggcttcattcagctccggttcccaacgatcaaggcgagttacatgatcccccatgttgtgcaaaaaagcggttagctccttcggtcctccgatcgttgtcagaagtaagttggccgcagtgttatcactcatggttatggcagcactgcataattctcttactgtcatgccatccgtaagatgcttttctgtgactggtgagtactcaaccaagtcattctgagaatagtgtatgcggcgaccgagttgctcttgcccggcgtcaacacgggataataccgcgccacatagcagaactttaaaagtgctcatcattggaaaacgttcttcggggcgaaaactctcaaggatcttaccgctgttgagatccagttcgatgtaacccactcgtgcacccaactgatcttcagcatcttttactttcaccagcgtttctgggtgagcaaaaacaggaaggcaaaatgccgcaaaaaagggaataagggcgacacggaaatgttgaatactcatactcttcctttttcaatattattgaagcatttatcagggttattgtctcatgagcggatacatatttgaatgtatttagaaaaataaacaaataggggttccgcgcacatttccccgaaaagtgccacctgacgtctaagaaaccattattatcatgacattaacctataaaaataggcgtatcacgaggccctttcgtcttcaagaattggtcgacgatcttgctgcgttcggatattttcgtggagttcccgccacagacccggattgaaggcgagatccagcaactcgcgccagatcatcctgtgacggaactttggcgcgtgatgactggccaggacgtcggccgaaagagcgacaagcagatcacgcttttcgacagcgtcggatttgcgatcgaggatttttcggcgctgcgctacgtccgcgaccgcgttgagggatcaagccacagcagcccactcgaccttctagccgacccagacgagccaagggatctttttggaatgctgctccgtcgtcaggctttccgacgtttgggtggttgaacagaagtcattatcgtacggaatgccaagcactcccgaggggaaccctgtggttggcatgcacatacaaatggacgaacggataaaccttttcacgcccttttaaatatccgttattctaataaacgctcttttctcttaggtttacccgccaatatatcctgtcaaacactgatagtttaaactgaaggcgggaaacgacaatctgatcatgagcggagaattaagggagtcacgttatgacccccgccgatgacgcgggacaagccgttttacgtttggaactgacagaaccgcaacgttgaaggagccactcagc

SEQ ID NO: 11 - DNA, 4678 bp, artificial sequence
  vector
gaaaggcccagtcttccgactgagcctttcgttttatttgatgcctggcagttccctactctcgcgttaacgctagcatggatgttttcccagtcacgacgttgtaaaacgacggccagtcttaagctcgggcccgcgttaacgctaccatggagctccaaataatgattttattttgactgatagtgacctgttcgttgcaacaaattgataagcaatgcttttttataatgccaactttgtatagaaaagttgggccgaattcgagctcggtacggccagaatggcccggaccgggttaccgaattcgagctcggtaccctgggatccctggtaattattggctgtaggattctaaacagagcctaaatagctggaatagctctagccctcaatccaaactaatgatatctatacttatgcaactctaaatttttattctaaaagtaatatttcatttttgtcaacgagattctctactctattccacaatcttttgaagcaatatttaccttaaatctgtactctataccaataatcatatattctattatttatttttatctctctcctaaggagcatccccctatgtctgcatggcccccgcctcgggtcccaatctcttgctctgctagtagcacagaagaaaacactagaaatgacttgcttgacttagagtatcagataaacatcatgtttacttaactttaatttgtatcggtttctactatttttataatatttttgtctctatagatactacgtgcaacagtataatcaacctagtttaatccagagcgaaggattttttactaagtacgtgactccatatgcacagcgttccttttatggttcctcactgggcacagcataaacgaaccctgtccaatgttttcagcgcgaacaaacagaaattccatcagcgaacaaacaacatacatgcgagatgaaaataaataataaaaaaagctccgtctcgataggccggcacgaatcgagagcctccatagccagttttttccatcggaacggcggttcgcgcacctaattatatgcaccacacgcctataaagccaaccaacccgtcggaggggcgcaagccagacagaagacagcccgtcagcccctctcgtttttcatccgccttcgcctccaaccgcgtgcgctccacgcctcctccaggaaagcgaggatctcccccaaatccacccgtcggcacctccgcttcaaggtacgccgctcgtcctccccccccccccctctctaccttctctagatcggcgttccggtccatggttagggcccggtagttctacttctgttcatgtttgtgttagatccgtgtttgtgttagatccgtgctgctagcgttcgtacacggatgcgacctgtacgtcagacacgttctgattgctaacttgccagtgtttctctttggggaatcctgggatggctctagccgttccgcagacgggatcgatttcatgattttttttgtttcgttgcatagggtttggtttgcccttttcctttatttcaatatatgccgtgcacttgtttgtcgggtcatcttttcatgcttttttttgtcttggttgtgatgatgtggtctggttgggcggtcgttctagatcggagtagaattctgtttcaaactacctggtggatttattaattttggatctgtatgtgtgtgccatacatattcatagttacgaattgaagatgatggatggaaatatcgatctaggataggtatacatgttgatgcgggttttactgatgcatatacagagatgctttttgttcgcttggttgtgatgatgtggtgtggttgggcggtcgttcattcgttctagatcggagtagaatactgtttcaaactacctggtgtatttattaattttggaactgtatgtgtgtgtcatacatcttcatagttacgagtttaagatggatggaaatatcgatctaggataggtatacatgttgatgtgggttttactgatgcatatacatgatggcatatgcagcatctattcatatgctctaaccttgagtacctatctattataataaacaagtatgttttataattattttgatcttgatatacttggatgatggcatatgcagcagctatatgtggatttttttagccctgccttcatacgctatttatttgcttggtactgtttcttttgtcgatgctcaccctgttgtttggtgttacttctgcaggtcgactctagaagcttggtcacccggtccgggcctagaaggccagcttcaagtttgtacaaaaaagttgaacgagaaacgtaaaatgatataaatatcaatatattaaattagattttgcataaaaaacagactacataatactgtaaaacacaacatatgcagtcactatgaatcaactacttagatggtattagtgacctgtagaattcgagctctagagctgcagggcggccgcgatatcccctatagtgagtcgtattacatggtcatagctgtttcctggcagctctggcccgtgtctcaaaatctctgatgttacattgcacaagataaaaatatatcatcatgaacaataaaactgtctgcttacataaacagtaatacaaggggtgttatgagccatattcaacgggaaacgtcgaggccgcgattaaattccaacatggatgctgatttatatgggtataaatgggctcgcgataatgtcgggcaatcaggtgcgacaatctatcgcttgtatgggaagcccgatgcgccagagttgtttctgaaacatggcaaaggtagcgttgccaatgatgttacagatgagatggtcagactaaactggctgacggaatttatgcctcttccgaccatcaagcattttatccgtactcctgatgatgcatggttactcaccactgcgatccccggaaaaacagcattccaggtattagaagaatatcctgattcaggtgaaaatattgttgatgcgctggcagtgttcctgcgccggttgcattcgattcctgtttgtaattgtccttttaacagcgatcgcgtatttcgtctcgctcaggcgcaatcacgaatgaataacggtttggttgatgcgagtgattttgatgacgagcgtaatggctggcctgttgaacaagtctggaaagaaatgcataaacttttgccattctcaccggattcagtcgtcactcatggtgatttctcacttgataaccttatttttgacgaggggaaattaataggttgtattgatgttggacgagtcggaatcgcagaccgataccaggatcttgccatcctatggaactgcctcggtgagttttctccttcattacagaaacggctttttcaaaaatatggtattgataatcctgatatgaataaattgcagtttcatttgatgctcgatgagtttttctaatcagaattggttaattggttgtaacactggcagagcattacgctgacttgacgggacggcgcaagctcatgaccaaaatcccttaacgtgagttacgcgtcgttccactgagcgtcagaccccgtagaaaagatcaaaggatcttcttgagatcctttttttctgcgcgtaatctgctgcttgcaaacaaaaaaaccaccgctaccagcggtggtttgtttgccggatcaagagctaccaactctttttccgaaggtaactggcttcagcagagcgcagataccaaatactgtccttctagtgtagccgtagttaggccaccacttcaagaactctgtagcaccgcctacatacctcgctctgctaatcctgttaccagtggctgctgccagtggcgataagtcgtgtcttaccgggttggactcaagacgatagttaccggataaggcgcagcggtcgggctgaacggggggttcgtgcacacagcccagcttggagcgaacgacctacaccgaactgagatacctacagcgtgagcattgagaaagcgccacgcttcccgaagggagaaaggcggacaggtatccggtaagcggcagggtcggaacaggagagcgcacgagggagcttccagggggaaacgcctggtatctttatagtcctgtcgggtttcgccacctctgacttgagcgtcgatttttgtgatgctcgtcaggggggcggagcctatggaaaaacgccagcaacgcggcctttttacggttcctggccttttgctggccttttgctcacatgttctttcctgcgttatcccctgattctgtggataaccgtattaccgcctttgagtgagctgataccgctcgccgcagccgaacgaccgagcgcagcgagtcagtgagcgaggaagcggaagagcgcccaatacgcaaaccgcctctccccgcgcgttggccgattcattaatgcagctggcacgacaggtttcccgactggaaagcgggcagtgagcgcaacgcaattaatacgcgtaccgctagccaggaagagtttgtagaaacgcaaaaaggccatccgtcaggatggccttctgcttagtttgatgcctggcagtttatggcgggcgtcctgcccgccaccctccgggccgttgcttcacaacgttcaaatccgctcccggcggatttgtcctactcaggagagcgttcaccgacaaacaacagataaaac

SEQ ID NO: 12 - DNA, 3505 bp, artificial sequence
  vector
gatccccgggtaccgagctcgaattcggcccaagtttgtacaaaaaagttgaacgagaaacgtaaaatgatataaatatcaatatattaaattagattttgcataaaaaacagactacataatactgtaaaacacaacatatgcagtcactatgaatcaactacttagatggtattagtgacctgtagaattcgagctctagagctgcagggcggccgcgatatcccctatagtgagtcgtattacatggtcatagctgtttcctggcagctctggcccgtgtctcaaaatctctgatgttacattgcacaagataaaaatatatcatcatgaacaataaaactgtctgcttacataaacagtaatacaaggggtgttatgagccatattcaacgggaaacgtcgaggccgcgattaaattccaacatggatgctgatttatatgggtataaatgggctcgcgataatgtcgggcaatcaggtgcgacaatctatcgcttgtatgggaagcccgatgcgccagagttgtttctgaaacatggcaaaggtagcgttgccaatgatgttacagatgagatggtcagactaaactggctgacggaatttatgcctcttccgaccatcaagcattttatccgtactcctgatgatgcatggttactcaccactgcgatccccggaaaaacagcattccaggtattagaagaatatcctgattcaggtgaaaatattgttgatgcgctggcagtgttcctgcgccggttgcattcgattcctgtttgtaattgtccttttaacagcgatcgcgtatttcgtctcgctcaggcgcaatcacgaatgaataacggtttggttgatgcgagtgattttgatgacgagcgtaatggctggcctgttgaacaagtctggaaagaaatgcataaacttttgccattctcaccggattcagtcgtcactcatggtgatttctcacttgataaccttatttttgacgaggggaaattaataggttgtattgatgttggacgagtcggaatcgcagaccgataccaggatcttgccatcctatggaactgcctcggtgagttttctccttcattacagaaacggctttttcaaaaatatggtattgataatcctgatatgaataaattgcagtttcatttgatgctcgatgagtttttctaatcagaattggttaattggttgtaacactggcagagcattacgctgacttgacgggacggcgcaagctcatgaccaaaatcccttaacgtgagttacgcgtcgttccactgagcgtcagaccccgtagaaaagatcaaaggatcttcttgagatcctttttttctgcgcgtaatctgctgcttgcaaacaaaaaaaccaccgctaccagcggtggtttgtttgccggatcaagagctaccaactctttttccgaaggtaactggcttcagcagagcgcagataccaaatactgtccttctagtgtagccgtagttaggccaccacttcaagaactctgtagcaccgcctacatacctcgctctgctaatcctgttaccagtggctgctgccagtggcgataagtcgtgtcttaccgggttggactcaagacgatagttaccggataaggcgcagcggtcgggctgaacggggggttcgtgcacacagcccagcttggagcgaacgacctacaccgaactgagatacctacagcgtgagcattgagaaagcgccacgcttcccgaagggagaaaggcggacaggtatccggtaagcggcagggtcggaacaggagagcgcacgagggagcttccagggggaaacgcctggtatctttatagtcctgtcgggtttcgccacctctgacttgagcgtcgatttttgtgatgctcgtcaggggggcggagcctatggaaaaacgccagcaacgcggcctttttacggttcctggccttttgctggccttttgctcacatgttctttcctgcgttatcccctgattctgtggataaccgtattaccgcctttgagtgagctgataccgctcgccgcagccgaacgaccgagcgcagcgagtcagtgagcgaggaagcggaagagcgcccaatacgcaaaccgcctctccccgcgcgttggccgattcattaatgcagctggcacgacaggtttcccgactggaaagcgggcagtgagcgcaacgcaattaatacgcgtaccgctagccaggaagagtttgtagaaacgcaaaaaggccatccgtcaggatggccttctgcttagtttgatgcctggcagtttatggcgggcgtcctgcccgccaccctccgggccgttgcttcacaacgttcaaatccgctcccggcggatttgtcctactcaggagagcgttcaccgacaaacaacagataaaacgaaaggcccagtcttccgactgagcctttcgttttatttgatgcctggcagttccctactctcgcgttaacgctagcatggatgttttcccagtcacgacgttgtaaaacgacggccagtcttaagctcgggcccgcgttaacgctaccatggagctccaaataatgattttattttgactgatagtgacctgttcgttgcaacaaattgataagcaatgcttttttataatgccaactttgtatagaaaagttgaagcttaaatccttacagaattgctgtagtttcatagtgctagatgtggacagcaaagcgccgctgtatgcttctgcttttcttttttggtgtgtgtagccacatcctttgttcctgcccggcgccatcccacttggttgtttttttttatgattgaaagccttcatgcttcctcggtcaatcaccggtgcgcactgggagcatcgccggaaaaaaaattcttcggctaagagtaacttctttctccttttcttctctgatctcgcgagcagtgctgataacgtgttgtaatctacttagcggtaacgagattgagagagacaaaatgacagaactattgtctttattgcagagtgtcatgtatttatacaggggatacaaagtctcccaaggggtgtgtcccttgggagtaactgccagttgatcacaggacaatattttgtaacaaaacgtacacatcgtcaaaatagcgaggcatgaaactggccttggccatggacgcgtgaagcgcgccatgcgttggatatgtggtcaataagtatatacaatacaatgtttaacagagctgatagtactgctttggcacatttttgtccacgcttcatgagagataaaacacctgcacgtaaattcacatgctgcactgaaggcccgatcactgaggagcgaactgccgtaactcccttctatatatacccccagtccctgtttcagttttcgtcaagctagcagcaccaagttgtcgatcacttgcctgctcttgagctcgattaagctatcatcagctacagcatccgatcccaaactgcaactgtagcagcgacaactgccg

SEQ ID NO: 13 - DNA, 49765 bp, artificial sequence
  vector
ggggggggggggggggggttccattgttcattccacggacaaaaacagagaaaggaaacgacagaggccaaaaagctcgctttcagcacctgtcgtttcctttcttttcagagggtattttaaataaaaacattaagttatgacgaagaagaacggaaacgccttaaaccggaaaattttcataaatagcgaaaacccgcgaggtcgccgccccgtaacctgtcggatcaccggaaaggacccgtaaagtgataatgattatcatctacatatcacaacgtgcgtggaggccatcaaaccacgtcaaataatcaattatgacgcaggtatcgtattaattgatctgcatcaacttaacgtaaaaacaacttcagacaatacaaatcagcgacactgaatacggggcaacctcatgtcccccccccccccccccctgcaggcatcgtggtgtcacgctcgtcgtttggtatggcttcattcagctccggttcccaacgatcaaggcgagttacatgatcccccatgttgtgcaaaaaagcggttagctccttcggtcctccgatcgttgtcagaagtaagttggccgcagtgttatcactcatggttatggcagcactgcataattctcttactgtcatgccatccgtaagatgcttttctgtgactggtgagtactcaaccaagtcattctgagaatagtgtatgcggcgaccgagttgctcttgcccggcgtcaacacgggataataccgcgccacatagcagaactttaaaagtgctcatcattggaaaacgttcttcggggcgaaaactctcaaggatcttaccgctgttgagatccagttcgatgtaacccactcgtgcacccaactgatcttcagcatcttttactttcaccagcgtttctgggtgagcaaaaacaggaaggcaaaatgccgcaaaaaagggaataagggcgacacggaaatgttgaatactcatactcttcctttttcaatattattgaagcatttatcagggttattgtctcatgagcggatacatatttgaatgtatttagaaaaataaacaaataggggttccgcgcacatttccccgaaaagtgccacctgacgtctaagaaaccattattatcatgacattaacctataaaaataggcgtatcacgaggccctttcgtcttcaagaattcggagcttttgccattctcaccggattcagtcgtcactcatggtgatttctcacttgataaccttatttttgacgaggggaaattaataggttgtattgatgttggacgagtcggaatcgcagaccgataccaggatcttgccatcctatggaactgcctcggtgagttttctccttcattacagaaacggctttttcaaaaatatggtattgataatcctgatatgaataaattgcagtttcatttgatgctcgatgagtttttctaatcagaattggttaattggttgtaacactggcagagcattacgctgacttgacgggacggcggctttgttgaataaatcgaacttttgctgagttgaaggatcagatcacgcatcttcccgacaacgcagaccgttccgtggcaaagcaaaagttcaaaatcaccaactggtccacctacaacaaagctctcatcaaccgtggctccctcactttctggctggatgatggggcgattcaggcctggtatgagtcagcaacaccttcttcacgaggcagacctcagcgccagaaggccgccagagaggccgagcgcggccgtgaggcttggacgctagggcagggcatgaaaaagcccgtagcgggctgctacgggcgtctgacgcggtggaaagggggaggggatgttgtctacatggctctgctgtagtgagtgggttgcgctccggcagcggtcctgatcaatcgtcaccctttctcggtccttcaacgttcctgacaacgagcctccttttcgccaatccatcgacaatcaccgcgagtccctgctcgaacgctgcgtccggaccggcttcgtcgaaggcgtctatcgcggcccgcaacagcggcgagagcggagcctgttcaacggtgccgccgcgctcgccggcatcgctgtcgccggcctgctcctcaagcacggccccaacagtgaagtagctgattgtcatcagcgcattgacggcgtccccggccgaaaaacccgcctcgcagaggaagcgaagctgcgcgtcggccgtttccatctgcggtgcgcccggtcgcgtgccggcatggatgcgcgcgccatcgcggtaggcgagcagcgcctgcctgaagctgcgggcattcccgatcagaaatgagcgccagtcgtcgtcggctctcggcaccgaatgcgtatgattctccgccagcatggcttcggccagtgcgtcgagcagcgcccgcttgttcctgaagtgccagtaaagcgccggctgctgaacccccaaccgttccgccagtttgcgtgtcgtcagaccgtctacgccgacctcgttcaacaggtccagggcggcacggatcactgtattcggctgcaactttgtcatgcttgacactttatcactgataaacataatatgtccaccaacttatcagtgataaagaatccgcgcgttcaatcggaccagcggaggctggtccggaggccagacgtgaaacccaacatacccctgatcgtaattctgagcactgtcgcgctcgacgctgtcggcatcggcctgattatgccggtgctgccgggcctcctgcgcgatctggttcactcgaacgacgtcaccgcccactatggcattctgctggcgctgtatgcgttggtgcaatttgcctgcgcacctgtgctgggcgcgctgtcggatcgtttcgggcggcggccaatcttgctcgtctcgctggccggcgccactgtcgactacgccatcatggcgacagcgcctttcctttgggttctctatatcgggcggatcgtggccggcatcaccggggcgactggggcggtagccggcgcttatattgccgatatcactgatggcgatgagcgcgcgcggcacttcggcttcatgagcgcctgtttcgggttcgggatggtcgcgggacctgtgctcggtgggctgatgggcggtttctccccccacgctccgttcttcgccgcggcagccttgaacggcctcaatttcctgacgggctgtttccttttgccggagtcgcacaaaggcgaacgccggccgttacgccgggaggctctcaacccgctcgcttcgttccggtgggcccggggcatgaccgtcgtcgccgccctgatggcggtcttcttcatcatgcaacttgtcggacaggtgccggccgcgctttgggtcattttcggcgaggatcgctttcactgggacgcgaccacgatcggcatttcgcttgccgcatttggcattctgcattcactcgcccaggcaatgatcaccggccctgtagccgcccggctcggcgaaaggcgggcactcatgctcggaatgattgccgacggcacaggctacatcctgcttgccttcgcgacacggggatggatggcgttcccgatcatggtcctgcttgcttcgggtggcatcggaatgccggcgctgcaagcaatgttgtccaggcaggtggatgaggaacgtcaggggcagctgcaaggctcactggcggcgctcaccagcctgacctcgatcgtcggacccctcctcttcacggcgatctatgcggcttctataacaacgtggaacgggtgggcatggattgcaggcgctgccctctacttgctctgcctgccggcgctgcgtcgcgggctttggagcggcgcagggcaacgagccgatcgctgatcgtggaaacgataggcctatgccatgcgggtcaaggcgacttccggcaagctatacgcgccctaggagtgcggttggaacgttggcccagccagatactcccgatcacgagcaggacgccgatgatttgaagcgcactcagcgtctgatccaagaacaaccatcctagcaacacggcggtccccgggctgagaaagcccagtaaggaaacaactgtaggttcgagtcgcgagatcccccggaaccaaaggaagtaggttaaacccgctccgatcaggccgagccacgccaggccgagaacattggttcctgtaggcatcgggattggcggatcaaacactaaagctactggaacgagcagaagtcctccggccgccagttgccaggcggtaaaggtgagcagaggcacgggaggttgccacttgcgggtcagcacggttccgaacgccatggaaaccgcccccgccaggcccgctgcgacgccgacaggatctagcgctgcgtttggtgtcaacaccaacagcgccacgcccgcagttccgcaaatagcccccaggaccgccatcaatcgtatcgggctacctagcagagcggcagagatgaacacgaccatcagcggctgcacagcgcctaccgtcgccgcgaccccgcccggcaggcggtagaccgaaataaacaacaagctccagaatagcgaaatattaagtgcgccgaggatgaagatgcgcatccaccagattcccgttggaatctgtcggacgatcatcacgagcaataaacccgccggcaacgcccgcagcagcataccggcgacccctcggcctcgctgttcgggctccacgaaaacgccggacagatgcgccttgtgagcgtccttggggccgtcctcctgtttgaagaccgacagcccaatgatctcgccgtcgatgtaggcgccgaatgccacggcatctcgcaaccgttcagcgaacgcctccatgggctttttctcctcgtgctcgtaaacggacccgaacatctctggagctttcttcagggccgacaatcggatctcgcggaaatcctgcacgtcggccgctccaagccgtcgaatctgagccttaatcacaattgtcaattttaatcctctgtttatcggcagttcgtagagcgcgccgtgcgtcccgagcgatactgagcgaagcaagtgcgtcgagcagtgcccgcttgttcctgaaatgccagtaaagcgctggctgctgaacccccagccggaactgaccccacaaggccctagcgtttgcaatgcaccaggtcatcattgacccaggcgtgttccaccaggccgctgcctcgcaactcttcgcaggcttcgccgacctgctcgcgccacttcttcacgcgggtggaatccgatccgcacatgaggcggaaggtttccagcttgagcgggtacggctcccggtgcgagctgaaatagtcgaacatccgtcgggccgtcggcgacagcttgcggtacttctcccatatgaatttcgtgtagtggtcgccagcaaacagcacgacgatttcctcgtcgatcaggacctggcaacgggacgttttcttgccacggtccaggacgcggaagcggtgcagcagcgacaccgattccaggtgcccaacgcggtcggacgtgaagcccatcgccgtcgcctgtaggcgcgacaggcattcctcggccttcgtgtaataccggccattgatcgaccagcccaggtcctggcaaagctcgtagaacgtgaaggtgatcggctcgccgataggggtgcgcttcgcgtactccaacacctgctgccacaccagttcgtcatcgtcggcccgcagctcgacgccggtgtaggtgatcttcacgtccttgttgacgtggaaaatgaccttgttttgcagcgcctcgcgcgggattttcttgttgcgcgtggtgaacagggcagagcgggccgtgtcgtttggcatcgctcgcatcgtgtccggccacggcgcaatatcgaacaaggaaagctgcatttccttgatctgctgcttcgtgtgtttcagcaacgcggcctgcttggcctcgctgacctgttttgccaggtcctcgccggcggtttttcgcttcttggtcgtcatagttcctcgcgtgtcgatggtcatcgacttcgccaaacctgccgcctcctgttcgagacgacgcgaacgctccacggcggccgatggcgcgggcagggcagggggagccagttgcacgctgtcgcgctcgatcttggccgtagcttgctggaccatcgagccgacggactggaaggtttcgcggggcgcacgcatgacggtgcggcttgcgatggtttcggcatcctcggcggaaaaccccgcgtcgatcagttcttgcctgtatgccttccggtcaaacgtccgattcattcaccctccttgcgggattgccccgactcacgccggggcaatgtgcccttattcctgatttgacccgcctggtgccttggtgtccagataatccaccttatcggcaatgaagtcggtcccgtagaccgtctggccgtccttctcgtacttggtattccgaatcttgccctgcacgaataccagcgaccccttgcccaaatacttgccgtgggcctcggcctgagagccaaaacacttgatgcggaagaagtcggtgcgctcctgcttgtcgccggcatcgttgcgccactcttcattaaccgctatatcgaaaattgcttgcggcttgttagaattgccatgacgtacctcggtgtcacgggtaagattaccgataaactggaactgattatggctcatatcgaaagtctccttgagaaaggagactctagtttagctaaacattggttccgctgtcaagaactttagcggctaaaattttgcgggccgcgaccaaaggtgcgaggggcggcttccgctgtgtacaaccagatatttttcaccaacatccttcgtctgctcgatgagcggggcatgacgaaacatgagctgtcggagagggcaggggtttcaatttcgtttttatcagacttaaccaacggtaaggccaacccctcgttgaaggtgatggaggccattgccgacgccctggaaactcccctacctcttctcctggagtccaccgaccttgaccgcgaggcactcgcggagattgcgggtcatcctttcaagagcagcgtgccgcccggatacgaacgcatcagtgtggttttgccgtcacataaggcgtttatcgtaaagaaatggggcgacgacacccgaaaaaagctgcgtggaaggctctgacgccaagggttagggcttgcacttccttctttagccgctaaaacggccccttctctgcgggccgtcggctcgcgcatcatatcgacatcctcaacggaagccgtgccgcgaatggcatcgggcgggtgcgctttgacagttgttttctatcagaacccctacgtcgtgcggttcgattagctgtttgtcttgcaggctaaacactttcggtatatcgtttgcctgtgcgataatgttgctaatgatttgttgcgtaggggttactgaaaagtgagcgggaaagaagagtttcagaccatcaaggagcgggccaagcgcaagctggaacgcgacatgggtgcggacctgttggccgcgctcaacgacccgaaaaccgttgaagtcatgctcaacgcggacggcaaggtgtggcacgaacgccttggcgagccgatgcggtacatctgcgacatgcggcccagccagtcgcaggcgattatagaaacggtggccggattccacggcaaagaggtcacgcggcattcgcccatcctggaaggcgagttccccttggatggcagccgctttgccggccaattgccgccggtcgtggccgcgccaacctttgcgatccgcaagcgcgcggtcgccatcttcacgctggaacagtacgtcgaggcgggcatcatgacccgcgagcaatacgaggtcattaaaagcgccgtcgcggcgcatcgaaacatcctcgtcattggcggtactggctcgggcaagaccacgctcgtcaacgcgatcatcaatgaaatggtcgccttcaacccgtctgagcgcgtcgtcatcatcgaggacaccggcgaaatccagtgcgccgcagagaacgccgtccaataccacaccagcatcgacgtctcgatgacgctgctgctcaagacaacgctgcgtatgcgccccgaccgcatcctggtcggtgaggtacgtggccccgaagcccttgatctgttgatggcctggaacaccgggcatgaaggaggtgccgccaccctgcacgcaaacaaccccaaagcgggcctgagccggctcgccatgcttatcagcatgcacccggattcaccgaaacccattgagccgctgattggcgaggcggttcatgtggtcgtccatatcgccaggacccctagcggccgtcgagtgcaagaaattctcgaagttcttggttacgagaacggccagtacatcaccaaaaccctgtaaggagtatttccaatgacaacggctgttccgttccgtctgaccatgaatcgcggcattttgttctaccttgccgtgttcttcgttctcgctctcgcgttatccgcgcatccggcgatggcctcggaaggcaccggcggcagcttgccatatgagagctggctgacgaacctgcgcaactccgtaaccggcccggtggccttcgcgctgtccatcatcggcatcgtcgtcgccggcggcgtgctgatcttcggcggcgaactcaacgccttcttccgaaccctgatcttcctggttctggtgatggcgctgctggtcggcgcgcagaacgtgatgagcaccttcttcggtcgtggtgccgaaatcgcggccctcggcaacggggcgctgcaccaggtgcaagtcgcggcggcggatgccgtgcgtgcggtagcggctggacggctcgcctaatcatggctctgcgcacgatccccatccgtcgcgcaggcaaccgagaaaacctgttcatgggtggtgatcgtgaactggtgatgttctcgggcctgatggcgtttgcgctgattttcagcgcccaagagctgcgggccaccgtggtcggtctgatcctgtggttcggggcgctctatgcgttccgaatcatggcgaaggccgatccgaagatgcggttcgtgtacctgcgtcaccgccggtacaagccgtattacccggcccgctcgaccccgttccgcgagaacaccaatagccaagggaagcaataccgatgatccaagcaattgcgattgcaatcgcgggcctcggcgcgcttctgttgttcatcctctttgcccgcatccgcgcggtcgatgccgaactgaaactgaaaaagcatcgttccaaggacgccggcctggccgatctgctcaactacgccgctgtcgtcgatgacggcgtaatcgtgggcaagaacggcagctttatggctgcctggctgtacaagggcgatgacaacgcaagcagcaccgaccagcagcgcgaagtagtgtccgcccgcatcaaccaggccctcgcgggcctgggaagtgggtggatgatccatgtggacgccgtgcggcgtcctgctccgaactacgcggagcggggcctgtcggcgttccctgaccgtctgacggcagcgattgaagaagagcgctcggtcttgccttgctcgtcggtgatgtacttcaccagctccgcgaagtcgctcttcttgatggagcgcatggggacgtgcttggcaatcacgcgcaccccccggccgttttagcggctaaaaaagtcatggctctgccctcgggcggaccacgcccatcatgaccttgccaagctcgtcctgcttctcttcgatcttcgccagcagggcgaggatcgtggcatcaccgaaccgcgccgtgcgcgggtcgtcggtgagccagagtttcagcaggccgcccaggcggcccaggtcgccattgatgcgggccagctcgcggacgtgctcatagtccacgacgcccgtgattttgtagccctggccgacggccagcaggtaggccgacaggctcatgccggccgccgccgccttttcctcaatcgctcttcgttcgtctggaaggcagtacaccttgataggtgggctgcccttcctggttggcttggtttcatcagccatccgcttgccctcatctgttacgccggcggtagccggccagcctcgcagagcaggattcccgttgagcaccgccaggtgcgaataagggacagtgaagaaggaacacccgctcgcgggtgggcctacttcacctatcctgcccggctgacgccgttggatacaccaaggaaagtctacacgaaccctttggcaaaatcctgtatatcgtgcgaaaaaggatggatataccgaaaaaatcgctataatgaccccgaagcagggttatgcagcggaaaagcgctgcttccctgctgttttgtggaatatctaccgactggaaacaggcaaatgcaggaaattactgaactgaggggacaggcgagagacgatgccaaagagctacaccgacgagctggccgagtgggttgaatcccgcgcggccaagaagcgccggcgtgatgaggctgcggttgcgttcctggcggtgagggcggatgtcgaggcggcgttagcgtccggctatgcgctcgtcaccatttgggagcacatgcgggaaacggggaaggtcaagttctcctacgagacgttccgctcgcacgccaggcggcacatcaaggccaagcccgccgatgtgcccgcaccgcaggccaaggctgcggaacccgcgccggcacccaagacgccggagccacggcggccgaagcaggggggcaaggctgaaaagccggcccccgctgcggccccgaccggcttcaccttcaacccaacaccggacaaaaaggatctactgtaatggcgaaaattcacatggttttgcagggcaagggcggggtcggcaagtcggccatcgccgcgatcattgcgcagtacaagatggacaaggggcagacacccttgtgcatcgacaccgacccggtgaacgcgacgttcgagggctacaaggccctgaacgtccgccggctgaacatcatggccggcgacgaaattaactcgcgcaacttcgacaccctggtcgagctgattgcgccgaccaaggatgacgtggtgatcgacaacggtgccagctcgttcgtgcctctgtcgcattacctcatcagcaaccaggtgccggctctgctgcaagaaatggggcatgagctggtcatccataccgtcgtcaccggcggccaggctctcctggacacggtgagcggcttcgcccagctcgccagccagttcccggccgaagcgcttttcgtggtctggctgaacccgtattgggggcctatcgagcatgagggcaagagctttgagcagatgaaggcgtacacggccaacaaggcccgcgtgtcgtccatcatccagattccggccctcaaggaagaaacctacggccgcgatttcagcgacatgctgcaagagcggctgacgttcgaccaggcgctggccgatgaatcgctcacgatcatgacgcggcaacgcctcaagatcgtgcggcgcggcctgtttgaacagctcgacgcggcggccgtgctatgagcgaccagattgaagagctgatccgggagattgcggccaagcacggcatcgccgtcggccgcgacgacccggtgctgatcctgcataccatcaacgcccggctcatggccgacagtgcggccaagcaagaggaaatccttgccgcgttcaaggaagagctggaagggatcgcccatcgttggggcgaggacgccaaggccaaagcggagcggatgctgaacgcggccctggcggccagcaaggacgcaatggcgaaggtaatgaaggacagcgccgcgcaggcggccgaagcgatccgcagggaaatcgacgacggccttggccgccagctcgcggccaaggtcgcggacgcgcggcgcgtggcgatgatgaacatgatcgccggcggcatggtgttgttcgcggccgccctggtggtgtgggcctcgttatgaatcgcagaggcgcagatgaaaaagcccggcgttgccgggctttgtttttgcgttagctgggcttgtttgacaggcccaagctctgactgcgcccgcgctcgcgctcctgggcctgtttcttctcctgctcctgcttgcgcatcagggcctggtgccgtcgggctgcttcacgcatcgaatcccagtcgccggccagctcgggatgctccgcgcgcatcttgcgcgtcgccagttcctcgatcttgggcgcgtgaatgcccatgccttccttgatttcgcgcaccatgtccagccgcgtgtgcagggtctgcaagcgggcttgctgttgggcctgctgctgctgccaggcggcctttgtacgcggcagggacagcaagccgggggcattggactgtagctgctgcaaacgcgcctgctgacggtctacgagctgttctaggcggtcctcgatgcgctccacctggtcatgctttgcctgcacgtagagcgcaagggtctgctggtaggtctgctcgatgggcgcggattctaagagggcctgctgttccgtctcggcctcctgggccgcctgtagcaaatcctcgccgctgttgccgctggactgctttactgccggggactgctgttgccctgctcgcgccgtcgtcgcagttcggcttgcccccactcgattgactgcttcatttcgagccgcagcgatgcgatctcggattgcgtcaacggacggggcagcgcggaggtgtccggcttctccttgggtgagtcggtcgatgccatagccaaaggtttccttccaaaatgcgtccattgctggaccgtgtttctcattgatgcccgcaagcatcttcggcttgaccgccaggtcaagcgcgccttcatgggcggtcatgacggacgccgccatgaccttgccgccgttgttctcgatgtagccgcgtaatgaggcaatggtgccgcccatcgtcagcgtgtcatcgacaacgatgtacttctggccggggatcacctccccctcgaaagtcgggttgaacgccaggcgatgatctgaaccggctccggttcgggcgaccttctcccgctgcacaatgtccgtttcgacctcaaggccaaggcggtcggccagaacgaccgccatcatggccggaatcttgttgttccccgccgcctcgacggcgaggactggaacgatgcggggcttgtcgtcgccgatcagcgtcttgagctgggcaacagtgtcgtccgaaatcaggcgctcgaccaaattaagcgccgcttccgcgtcgccctgcttcgcagcctggtattcaggctcgttggtcaaagaaccaaggtcgccgttgcgaaccaccttcgggaagtctccccacggtgcgcgctcggctctgctgtagctgctcaagacgcctccctttttagccgctaaaactctaacgagtgcgcccgcgactcaacttgacgctttcggcacttacctgtgccttgccacttgcgtcataggtgatgcttttcgcactcccgatttcaggtactttatcgaaatctgaccgggcgtgcattacaaagttcttccccacctgttggtaaatgctgccgctatctgcgtggacgatgctgccgtcgtggcgctgcgacttatcggccttttgggccatatagatgttgtaaatgccaggtttcagggccccggctttatctaccttctggttcgtccatgcgccttggttctcggtctggacaattctttgcccattcatgaccaggaggcggtgtttcattgggtgactcctgacggttgcctctggtgttaaacgtgtcctggtcgcttgccggctaaaaaaaagccgacctcggcagttcgaggccggctttccctagagccgggcgcgtcaaggttgttccatctattttagtgaactgcgttcgatttatcagttactttcctcccgctttgtgtttcctcccactcgtttccgcgtctagccgacccctcaacatagcggcctcttcttgggctgcctttgcctcttgccgcgcttcgtcacgctcggcttgcaccgtcgtaaagcgctcggcctgcctggccgcctcttgcgccgccaacttcctttgctcctggtgggcctcggcgtcggcctgcgccttcgctttcaccgctgccaactccgtgcgcaaactctccgcttcgcgcctggtggcgtcgcgctcgccgcgaagcgcctgcatttcctggttggccgcgtccagggtcttgcggctctcttctttgaatgcgcgggcgtcctggtgagcgtagtccagctcggcgcgcagctcctgcgctcgacgctccacctcgtcggcccgctgcgtcgccagcgcggcccgctgctcggctcctgccagggcggtgcgtgcttcggccagggcttgccgctggcgtgcggccagctcggccgcctcggcggcctgctgctctagcaatgtaacgcgcgcctgggcttcttccagctcgcgggcctgcgcctcgaaggcgtcggccagctccccgcgcacggcttccaactcgttgcgctcacgatcccagccggcttgcgctgcctgcaacgattcattggcaagggcctgggcggcttgccagagggcggccacggcctggttgccggcctgctgcaccgcgtccggcacctggactgccagcggggcggcctgcgccgtgcgctggcgtcgccattcgcgcatgccggcgctggcgtcgttcatgttgacgcgggcggccttacgcactgcatccacggtcgggaagttctcccggtcgccttgctcgaacagctcgtccgcagccgcaaaaatgcggtcgcgcgtctctttgttcagttccatgttggctccggtaattggtaagaataataatactcttacctaccttatcagcgcaagagtttagctgaacagttctcgacttaacggcaggttttttagcggctgaagggcaggcaaaaaaagccccgcacggtcggcgggggcaaagggtcagcgggaaggggattagcgggcgtcgggcttcttcatgcgtcggggccgcgcttcttgggatggagcacgacgaagcgcgcacgcgcatcgtcctcggccctatcggcccgcgtcgcggtcaggaacttgtcgcgcgctaggtcctccctggtgggcaccaggggcatgaactcggcctgctcgatgtaggtccactccatgaccgcatcgcagtcgaggccgcgttccttcaccgtctcttgcaggtcgcggtacgcccgctcgttgagcggctggtaacgggccaattggtcgtaaatggctgtcggccatgagcggcctttcctgttgagccagcagccgacgacgaagccggcaatgcaggcccctggcacaaccaggccgacgccgggggcaggggatggcagcagctcgccaaccaggaaccccgccgcgatgatgccgatgccggtcaaccagcccttgaaactatccggccccgaaacacccctgcgcattgcctggatgctgcgccggatagcttgcaacatcaggagccgtttcttttgttcgtcagtcatggtccgccctcaccagttgttcgtatcggtgtcggacgaactgaaatcgcaagagctgccggtatcggtccagccgctgtccgtgtcgctgctgccgaagcacggcgaggggtccgcgaacgccgcagacggcgtatccggccgcagcgcatcgcccagcatggccccggtcagcgagccgccggccaggtagcccagcatggtgctgttggtcgccccggccaccagggccgacgtgacgaaatcgccgtcattccctctggattgttcgctgctcggcggggcagtgcgccgcgccggcggcgtcgtggatggctcgggttggctggcctgcgacggccggcgaaaggtgcgcagcagctcgttatcgaccggctgcggcgtcggggccgccgccttgcgctgcggtcggtgttccttcttcggctcgcgcagcttgaacagcatgatcgcggaaaccagcagcaacgccgcgcctacgcctcccgcgatgtagaacagcatcggattcattcttcggtcctccttgtagcggaaccgttgtctgtgcggcgcgggtggcccgcgccgctgtctttggggatcagccctcgatgagcgcgaccagtttcacgtcggcaaggttcgcctcgaactcctggccgtcgtcctcgtacttcaaccaggcatagccttccgccggcggccgacggttgaggataaggcgggcagggcgctcgtcgtgctcgacctggacgatggcctttttcagcttgtccgggtccggctccttcgcgcccttttccttggcgtccttaccgtcctggtcgccgtcctcgccgtcctggccgtcgccggcctccgcgtcacgctcggcatcagtctggccgttgaaggcatcgacggtgttgggatcgcggcccttctcgtccaggaactcgcgcagcagcttgaccgtgccgcgcgtgatttcctgggtgtcgtcgtcaagccacgcctcgacttcctccgggcgcttcttgaaggccgtcaccagctcgttcaccacggtcacgtcgcgcacgcggccggtgttgaacgcatcggcgatcttctccggcaggtccagcagcgtgacgtgctgggtgatgaacgccggcgacttgccgatttccttggcgatatcgcctttcttcttgcccttcgccagctcgcggccaatgaagtcggcaatttcgcgcggggtcagctcgttgcgttgcaggttctcgataacctggtcggcttcgttgtagtcgttgtcgatgaacgccgggatggacttcttgccggcccacttcgagccacggtagcggcgggcgccgtgattgatgatatagcggcccggctgctcctggttctcgcgcaccgaaatgggtgacttcaccccgcgctctttgatcgtggcaccgatttccgcgatgctctccggggaaaagccggggttgtcggccgtccgcggctgatgcggatcttcgtcgatcaggtccaggtccagctcgatagggccggaaccgccctgagacgccgcaggagcgtccaggaggctcgacaggtcgccgatgctatccaaccccaggccggacggctgcgccgcgcctgcggcttcctgagcggccgcagcggtgtttttcttggtggtcttggcttgagccgcagtcattgggaaatctccatcttcgtgaacacgtaatcagccagggcgcgaacctctttcgatgccttgcgcgcggccgttttcttgatcttccagaccggcacaccggatgcgagggcatcggcgatgctgctgcgcaggccaacggtggccggaatcatcatcttggggtacgcggccagcagctcggcttggtggcgcgcgtggcgcggattccgcgcatcgaccttgctgggcaccatgccaaggaattgcagcttggcgttcttctggcgcacgttcgcaatggtcgtgaccatcttcttgatgccctggatgctgtacgcctcaagctcgatgggggacagcacatagtcggccgcgaagagggcggccgccaggccgacgccaagggtcggggccgtgtcgatcaggcacacgtcgaagccttggttcgccagggccttgatgttcgccccgaacagctcgcgggcgtcgtccagcgacagccgttcggcgttcgccagtaccgggttggactcgatgagggcgaggcgcgcggcctggccgtcgccggctgcgggtgcggtttcggtccagccgccggcagggacagcgccgaacagcttgcttgcatgcaggccggtagcaaagtccttgagcgtgtaggacgcattgccctgggggtccaggtcgatcacggcaacccgcaagccgcgctcgaaaaagtcgaaggcaagatgcacaagggtcgaagtcttgccgacgccgcctttctggttggccgtgaccaaagttttcatcgtttggtttcctgttttttcttggcgtccgcttcccacttccggacgatgtacgcctgatgttccggcagaaccgccgttacccgcgcgtacccctcgggcaagttcttgtcctcgaacgcggcccacacgcgatgcaccgcttgcgacactgcgcccctggtcagtcccagcgacgttgcgaacgtcgcctgtggcttcccatcgactaagacgccccgcgctatctcgatggtctgctgccccacttccagcccctggatcgcctcctggaactggctttcggtaagccgtttcttcatggataacacccataatttgctccgcgccttggttgaacatagcggtgacagccgccagcacatgagagaagtttagctaaacatttctcgcacgtcaacacctttagccgctaaaactcgtccttggcgtaacaaaacaaaagcccggaaaccgggctttcgtctcttgccgcttatggctctgcacccggctccatcaccaacaggtcgcgcacgcgcttcactcggttgcggatcgacactgccagcccaacaaagccggttgccgccgccgccaggatcgcgccgatgatgccggccacaccggccatcgcccaccaggtcgccgccttccggttccattcctgctggtactgcttcgcaatgctggacctcggctcaccataggctgaccgctcgatggcgtatgccgcttctccccttggcgtaaaacccagcgccgcaggcggcattgccatgctgcccgccgctttcccgaccacgacgcgcgcaccaggcttgcggtccagaccttcggccacggcgagctgcgcaaggacataatcagccgccgacttggctccacgcgcctcgatcagctcttgcactcgcgcgaaatccttggcctccacggccgccatgaatcgcgcacgcggcgaaggctccgcagggccggcgtcgtgatcgccgccgagaatgcccttcaccaagttcgacgacacgaaaatcatgctgacggctatcaccatcatgcagacggatcgcacgaacccgctgaattgaacacgagcacggcacccgcgaccactatgccaagaatgcccaaggtaaaaattgccggccccgccatgaagtccgtgaatgccccgacggccgaagtgaagggcaggccgccacccaggccgccgccctcactgcccggcacctggtcgctgaatgtcgatgccagcacctgcggcacgtcaatgcttccgggcgtcgcgctcgggctgatcgcccatcccgttactgccccgatcccggcaatggcaaggactgccagcgctgccatttttggggtgaggccgttcgcggccgaggggcgcagcccctggggggatgggaggcccgcgttagcgggccgggagggttcgagaagggggggcaccccccttcggcgtgcgcggtcacgcgcacagggcgcagccctggttaaaaacaaggtttataaatattggtttaaaagcaggttaaaagacaggttagcggtggccgaaaaacgggcggaaacccttgcaaatgctggattttctgcctgtggacagcccctcaaatgtcaataggtgcgcccctcatctgtcagcactctgcccctcaagtgtcaaggatcgcgcccctcatctgtcagtagtcgcgcccctcaagtgtcaataccgcagggcacttatccccaggcttgtccacatcatctgtgggaaactcgcgtaaaatcaggcgttttcgccgatttgcgaggctggccagctccacgtcgccggccgaaatcgagcctgcccctcatctgtcaacgccgcgccgggtgagtcggcccctcaagtgtcaacgtccgcccctcatctgtcagtgagggccaagttttccgcgaggtatccacaacgccggcggccgcggtgtctcgcacacggcttcgacggcgtttctggcgcgtttgcagggccatagacggccgccagcccagcggcgagggcaaccagcccggtgagcgtcggaaaggcgctggaagccccgtagcgacgcggagaggggcgagacaagccaagggcgcaggctcgatgcgcagcacgacatagccggttctcgcaaggacgagaatttccctgcggtgcccctcaagtgtcaatgaaagtttccaacgcgagccattcgcgagagccttgagtccacgctagatgagagctttgttgtaggtggaccagttggtgattttgaacttttgctttgccacggaacggtctgcgttgtcgggaagatgcgtgatctgatccttcaactcagcaaaagttcgatttattcaacaaagccacgttgtgtctcaaaatctctgatgttacattgcacaagataaaaatatatcatcatgaacaataaaactgtctgcttacataaacagtaatacaaggggtgttatgagccatattcaacgggaaacgtcttgctcgactctagagctcgttcctcgaggcctcgaggcctcgaggaacggtacctgcggggaagcttacaataatgtgtgttgttaagtcttgttgcctgtcatcgtctgactgactttcgtcataaatcccggcctccgtaacccagctttgggcaagctcacggatttgatccggcggaacgggaatatcgagatgccgggctgaacgctgcagttccagctttccctttcgggacaggtactccagctgattgattatctgctgaagggtcttggttccacctcctggcacaatgcgaatgattacttgagcgcgatcgggcatccaattttctcccgtcaggtgcgtggtcaagtgctacaaggcacctttcagtaacgagcgaccgtcgatccgtcgccgggatacggacaaaatggagcgcagtagtccatcgagggcggcgaaagcctcgccaaaagcaatacgttcatctcgcacagcctccagatccgatcgagggtcttcggcgtaggcagatagaagcatggatacattgcttgagagtattccgatggactgaagtatggcttccatcttttctcgtgtgtctgcatctatttcgagaaagcccccgatgcggcgcaccgcaacgcgaattgccatactatccgaaagtcccagcaggcgcgcttgataggaaaaggtttcatactcggccgatcgcagacgggcactcacgaccttgaacccttcaactttcagggatcgatgctggttgatggtagtctcactcgacgtggctctggtgtgttttgacatagcttcctccaaagaaagcggaaggtctggatactccagcacgaaatgtgcccgggtagacggatggaagtctagccctgctcaatatgaaatcaacagtacatttacagtcaatactgaatatacttgctacatttgcaattgtcttataacgaatgtgaaataaaaatagtgtaacaacgcttttactcatcgataatcacaaaaacatttatacgaacaaaaatacaaatgcactccggtttcacaggataggcgggatcagaatatgcaacttttgacgttttgttctttcaaagggggtgctggcaaaaccaccgcactcatgggcctttgcgctgctttggcaaatgacggtaaacgagtggccctctttgatgccgacgaaaaccggcctctgacgcgatggagagaaaacgccttacaaagcagtactgggatcctcgctgtgaagtctattccgccgacgaaatgccccttcttgaagcagcctatgaaaatgccgagctcgaaggatttgattatgcgttggccgatacgcgtggcggctcgagcgagctcaacaacacaatcatcgctagctcaaacctgcttctgatccccaccatgctaacgccgctcgacatcgatgaggcactatctacctaccgctacgtcatcgagctgctgttgagtgaaaatttggcaattcctacagctgttttgcgccaacgcgtcccggtcggccgattgacaacatcgcaacgcaggatgtcagagacgctagagagccttccagttgtaccgtctcccatgcatgaaagagatgcatttgccgcgatgaaagaacgcggcatgttgcatcttacattactaaacacgggaactgatccgacgatgcgcctcatagagaggaatcttcggattgcgatggaggaagtcgtggtcatttcgaaactgatcagcaaaatcttggaggcttgaagatggcaattcgcaagcccgcattgtcggtcggcgaagcacggcggcttgctggtgctcgacccgagatccaccatcccaacccgacacttgttccccagaagctggacctccagcacttgcctgaaaaagccgacgagaaagaccagcaacgtgagcctctcgtcgccgatcacatttacagtcccgatcgacaacttaagctaactgtggatgcccttagtccacctccgtccccgaaaaagctccaggtttttctttcagcgcgaccgcccgcgcctcaagtgtcgaaaacatatgacaacctcgttcggcaatacagtccctcgaagtcgctacaaatgattttaaggcgcgcgttggacgatttcgaaagcatgctggcagatggatcatttcgcgtggccccgaaaagttatccgatcccttcaactacagaaaaatccgttctcgttcagacctcacgcatgttcccggttgcgttgctcgaggtcgctcgaagtcattttgatccgttggggttggagaccgctcgagctttcggccacaagctggctaccgccgcgctcgcgtcattctttgctggagagaagccatcgagcaattggtgaagagggacctatcggaacccctcaccaaatattgagtgtaggtttgaggccgctggccgcgtcctcagtcaccttttgagccagataattaagagccaaatgcaattggctcaggctgccatcgtccccccgtgcgaaacctgcacgtccgcgtcaaagaaataaccggcacctcttgctgtttttatcagttgagggcttgacggatccgcctcaagtttgcggcgcagccgcaaaatgagaacatctatactcctgtcgtaaacctcctcgtcgcgtactcgactggcaatgagaagttgctcgcgcgatagaacgtcgcggggtttctctaaaaacgcgaggagaagattgaactcacctgccgtaagtttcacctcaccgccagcttcggacatcaagcgacgttgcctgagattaagtgtccagtcagtaaaacaaaaagaccgtcggtctttggagcggacaacgttggggcgcacgcgcaaggcaacccgaatgcgtgcaagaaactctctcgtactaaacggcttagcgataaaatcacttgctcctagctcgagtgcaacaactttatccgtctcctcaaggcggtcgccactgataattatgattggaatatcagactttgccgccagatttcgaacgatctcaagcccatcttcacgacctaaatttagatcaacaaccacgacatcgaccgtcgcggaagagagtactctagtgaactgggtgctgtcggctaccgcggtcactttgaaggcgtggatcgtaaggtattcgataataagatgccgcatagcgacatcgtcatcgataagaagaacgtgtttcaacggctcacctttcaatctaaaatctgaacccttgttcacagcgcttgagaaattttcacgtgaaggatgtacaatcatctccagctaaatgggcagttcgtcagaattgcggctgaccgcggatgacgaaaatgcgaaccaagtatttcaattttatgacaaaagttctcaatcgttgttacaagtgaaacgcttcgaggttacagctactattgattaaggagatcgcctatggtctcgccccggcgtcgtgcgtccgccgcgagccagatctcgcctacttcataaacgtcctcataggcacggaatggaatgatgacatcgatcgccgtagagagcatgtcaatcagtgtgcgatcttccaagctagcaccttgggcgctacttttgacaagggaaaacagtttcttgaatccttggattggattcgcgccgtgtattgttgaaatcgatcccggatgtcccgagacgacttcactcagataagcccatgctgcatcgtcgcgcatctcgccaagcaatatccggtccggccgcatacgcagacttgcttggagcaagtgctcggcgctcacagcacccagcccagcaccgttcttggagtagagtagtctaacatgattatcgtgtggaatgacgagttcgagcgtatcttctatggtgattagcctttcctggggggggatggcgctgatcaaggtcttgctcattgttgtcttgccgcttccggtagggccacatagcaacatcgtcagtcggctgacgacgcatgcgtgcagaaacgcttccaaatccccgttgtcaaaatgctgaaggatagcttcatcatcctgattttggcgtttccttcgtgtctgccactggttccacctcgaagcatcataacgggaggagacttctttaagaccagaaacacgcgagcttggccgtcgaatggtcaagctgacggtgcccgagggaacggtcggcggcagacagatttgtagtcgttcaccaccaggaagttcagtggcgcagagggggttacgtggtccgacatcctgctttctcagcgcgcccgctaaaatagcgatatcttcaagatcatcataagagacgggcaaaggcatcttggtaaaaatgccggcttggcgcacaaatgcctctccaggtcgattgatcgcaatttcttcagtcttcgggtcatcgagccattccaaaatcggcttcagaagaaagcgtagttgcggatccacttccatttacaatgtatcctatctctaagcggaaatttgaattcattaagagcggcggttcctcccccgcgtggcgccgccagtcaggcggagctggtaaacaccaaagaaatcgaggtcccgtgctacgaaaatggaaacggtgtcaccctgattcttcttcagggttggcggtatgttgatggttgccttaagggctgtctcagttgtctgctcaccgttattttgaaagctgttgaagctcatcccgccacccgagctgccggcgtaggtgctagctgcctggaaggcgccttgaacaacactcaagagcatagctccgctaaaacgctgccagaagtggctgtcgaccgagcccggcaatcctgagcgaccgagttcgtccgcgcttggcgatgttaacgagatcatcgcatggtcaggtgtctcggcgcgatcccacaacacaaaaacgcgcccatctccctgttgcaagccacgctgtatttcgccaacaacggtggtgccacgatcaagaagcacgatattgttcgttgttccacgaatatcctgaggcaagacacactttacatagcctgccaaatttgtgtcgattgcggtttgcaagatgcacggaattattgtcccttgcgttaccataaaatcggggtgcggcaagagcgtggcgctgctgggctgcagctcggtgggtttcatacgtatcgacaaatcgttctcgccggacacttcgccattcggcaaggagttgtcgtcacgcttgccttcttgtcttcggcccgtgtcgccctgaatggcgcgtttgctgaccccttgatcgccgctgctatatgcaaaaatcggtgtttcttccggccgtggctcatgccgctccggttcgcccctcggcggtagaggagcagcaggctgaacagcctcttgaaccgctggaggatccggcggcacctcaatcggagctggatgaaatggcttggtgtttgttgcgatcaaagttgacggcgatgcgttctcattcaccttcttttggcgcccacctagccaaatgaggcttaatgataacgcgagaacgacacctccgacgatcaatttctgagaccccgaaagacgccggcgatgtttgtcggagaccagggatccagatgcatcaacctcatgtgccgcttgctgactatcgttattcatcccttcgcccccttcaggacgcgtttcacatcgggcctcaccgtgcccgtttgcggcctttggccaacgggatcgtaagcggtgttccagatacatagtactgtgtggccatccctcagacgccaacctcgggaaaccgaagaaatctcgacatcgctccctttaactgaatagttggcaacagcttccttgccatcaggattgatggtgtagatggagggtatgcgtacattgcccggaaagtggaataccgtcgtaaatccattgtcgaagacttcgagtggcaacagcgaacgatcgccttgggcgacgtagtgccaattactgtccgccgcaccaagggctgtgacaggctgatccaataaattctcagctttccgttgatattgtgcttccgcgtgtagtctgtccacaacagccttctgttgtgcctcccttcgccgagccgccgcatcgtcggcggggtaggcgaattggacgctgtaatagagatcgggctgctctttatcgaggtgggacagagtcttggaacttatactgaaaacataacggcgcatcccggagtcgcttgcggttagcacgattactggctgaggcgtgaggacctggcttgccttgaaaaatagataatttccccgcggtagggctgctagatctttgctatttgaaacggcaaccgctgtcaccgtttcgttcgtggcgaatgttacgaccaaagtagctccaaccgccgtcgagaggcgcaccacttgatcgggattgtaagccaaataacgcatgcgcggatctagcttgcccgccattggagtgtcttcagcctccgcaccagtcgcagcggcaaataaacatgctaaaatgaaaagtgcttttctgatcatggttcgctgtggcctacgtttgaaacggtatcttccgatgtctgataggaggtgacaaccagacctgccgggttggttagtctcaatctgccgggcaagctggtcaccttttcgtagcgaactgtcgcggtccacgtactcaccacaggcattttgccgtcaacgacgagggtccttttatagcgaatttgctgcgtgcttggagttacatcatttgaagcgatgtgctcgacctccaccctgccgcgtttgccaagaatgacttgaggcgaactgggattgggatagttgaagaattgctggtaatcctggcgcactgttggggcactgaagttcgataccaggtcgtaggcgtactgagcggtgtcggcatcataactctcgcgcaggcgaacgtactcccacaatgaggcgttaacgacggcctcctcttgagttgcaggcaatcgcgagacagacacctcgctgtcaacggtgccgtccggccgtatccatagatatacgggcacaagcctgctcaacggcaccattgtggctatagcgaacgcttgagcaacatttcccaaaatcgcgatagctgcgacagctgcaatgagtttggagagacgtcgcgccgatttcgctcgcgcggtttgaaaggcttctacttccttatagtgctcggcaaggctttcgcgcgccactagcatggcatattcaggccccgtcatagcgtccacccgaattgccgagctgaagatctgacggagtaggctgccatcgccccacattcagcgggaagatcgggcctttgcagctcgctaatgtgtcgtttgtctggcagccgctcaaagcgacaactaggcacagcaggcaatacttcatagaattctccattgaggcgaatttttgcgcgacctagcctcgctcaacctgagcgaagcgacggtacaagctgctggcagattgggttgcgccgctccagtaactgcctccaatgttgccggcgatcgccggcaaagcgacaatgagcgcatcccctgtcagaaaaaacatatcgagttcgtaaagaccaatgatcttggccgcggtcgtaccggcgaaggtgattacaccaagcataagggtgagcgcagtcgcttcggttaggatgacgatcgttgccacgaggtttaagaggagaagcaagagaccgtaggtgataagttgcccgatccacttagctgcgatgtcccgcgtgcgatcaaaaatatatccgacgaggatcagaggcccgatcgcgagaagcactttcgtgagaattccaacggcgtcgtaaactccgaaggcagaccagagcgtgccgtaaaggacccactgtgccccttggaaagcaaggatgtcctggtcgttcatcggaccgatttcggatgcgattttctgaaaaacggcctgggtcacggcgaacattgtatccaactgtgccggaacagtctgcagaggcaagccggttacactaaactgctgaacaaagtttgggaccgtcttttcgaagatggaaaccacatagtcttggtagttagcctgcccaacaattagagcaacaacgatggtgaccgtgatcacccgagtgataccgctacgggtatcgacttcgccgcgtatgactaaaataccctgaacaataatccaaagagtgacacaggcgatcaatggcgcactcaccgcctcctggatagtctcaagcatcgagtccaagcctgtcgtgaaggctacatcgaagatcgtatgaatggccgtaaacggcgccggaatcgtgaaattcatcgattggacctgaacttgactggtttgtcgcataatgttggataaaatgagctcgcattcggcgaggatgcgggcggatgaacaaatcgcccagccttaggggagggcaccaaagatgacagcggtcttttgatgctccttgcgttgagcggccgcctcttccgcctcgtgaaggccggcctgcgcggtagtcatcgttaataggcttgtcgcctgtacattttgaatcattgcgtcatggatctgcttgagaagcaaaccattggtcacggttgcctgcatgatattgcgagatcgggaaagctgagcagacgtatcagcattcgccgtcaagcgtttgtccatcgtttccagattgtcagccgcaatgccagcgctgtttgcggaaccggtgatctgcgatcgcaacaggtccgcttcagcatcactacccacgactgcacgatctgtatcgctggtgatcgcacgtgccgtggtcgacattggcattcgcggcgaaaacatttcattgtctaggtccttcgtcgaaggatactgatttttctggttgagcgaagtcagtagtccagtaacgccgtaggccgacgtcaacatcgtaaccatcgctatagtctgagtgagattctccgcagtcgcgagcgcagtcgcgagcgtctcagcctccgttgccgggtcgctaacaacaaactgcgcccgcgcgggctgaatatatagaaagctgcaggtcaaaactgttgcaataagttgcgtcgtcttcatcgtttcctaccttatcaatcttctgcctcgtggtgacgggccatgaattcgctgagccagccagatgagttgccttcttgtgcctcgcgtagtcgagttgcaaagcgcaccgtgttggcacgccccgaaagcacggcgacatattcacgcatatcccgcagatcaaattcgcagatgacgcttccactttctcgtttaagaagaaacttacggctgccgaccgtcatgtcttcacggatcgcctgaaattccttttcggtacatttcagtccatcgacataagccgatcgatctgcggttggtgatggatagaaaatcttcgtcatacattgcgcaaccaagctggctcctagcggcgattccagaacatgctctggttgctgcgttgccagtattagcatcccgttgttttttcgaacggtcaggaggaatttgtcgacgacagtcgaaaatttagggtttaacaaataggcgcgaaactcatcgcagctcatcacaaaacggcggccgtcgatcatggctccaatccgatgcaggagatatgctgcagcgggagcgcatacttcctcgtattcgagaagatgcgtcatgtcgaagccggtaatcgacggatctaactttacttcgtcaacttcgccgtcaaatgcccagccaagcgcatggccccggcaccagcgttggagccgcgctcctgcgccttcggcgggcccatgcaacaaaaattcacgtaaccccgcgattgaacgcatttgtggatcaaacgagagctgacgatggataccacggaccagacggcggttctcttccggagaaatcccaccccgaccatcactctcgatgagagccacgatccattcgcgcagaaaatcgtgtgaggctgctgtgttttctaggccacgcaacggcgccaacccgctgggtgtgcctctgtgaagtgccaaatatgttcctcctgtggcgcgaaccagcaattcgccaccccggtccttgtcaaagaacacgaccgtacctgcacggtcgaccatgctctgttcgagcatggctagaacaaacatcatgagcgtcgtcttacccctcccgataggcccgaatattgccgtcatgccaacatcgtgctcatgcgggatatagtcgaaaggcgttccgccattggtacgaaatcgggcaatcgcgttgccccagtggcctgagctggcgccctctggaaagttttcgaaagagacaaaccctgcgaaattgcgtgaagtgattgcgccagggcgtgtgcgccacttaaaattccccggcaattgggaccaataggccgcttccataccaataccttcttggacaaccacggcacctgcatccgccattcgtgtccgagcccgcgcgcccctgtccccaagactattgagatcgtctgcatagacgcaaaggctcaaatgatgtgagcccataacgaattcgttgctcgcaagtgcgtcctcagcctcggataatttgccgatttgagtcacggctttatcgccggaactcagcatctggctcgatttgaggctaagtttcgcgtgcgcttgcgggcgagtcaggaacgaaaaactctgcgtgagaacaagtggaaaatcgagggatagcagcgcgttgagcatgcccggccgtgtttttgcagggtattcgcgaaacgaatagatggatccaacgtaactgtcttttggcgttctgatctcgagtcctcgcttgccgcaaatgactctgtcggtataaatcgaagcgccgagtgagccgctgacgaccggaaccggtgtgaaccgaccagtcatgatcaaccgtagcgcttcgccaatttcggtgaagagcacaccctgcttctcgcggatgccaagacgatgcaggccatacgctttaagagagccagcgacaacatgccaaagatcttccatgttcctgatctggcccgtgagatcgttttccctttttccgcttagcttggtgaacctcctctttaccttccctaaagccgcctgtgggtagacaatcaacgtaaggaagtgttcattgcggaggagttggccggagagcacgcgctgttcaaaagcttcgttcaggctagcggcgaaaacactacggaagtgtcgcggcgccgatgatggcacgtcggcatgacgtacgaggtgagcatatattgacacatgatcatcagcgatattgcgcaacagcgtgttgaacgcacgacaacgcgcattgcgcatttcagtttcctcaagctcgaatgcaacgccatcaattctcgcaatggtcatgatcgatccgtcttcaagaaggacgatatggtcgctgaggtggccaatataagggagatagatctcaccggatctttcggtcgttccactcgcgccgagcatcacaccattcctctccctcgtgggggaaccctaattggatttgggctaacagtagcgcccccccaaactgcactatcaatgcttcttcccgcggtccgcaaaaatagcaggacgacgctcgccgcattgtagtctcgctccacgatgagccgggctgcaaaccataacggcacgagaacgacttcgtagagcgggttctgaacgataacgatgacaaagccggcgaacatcatgaataaccctgccaatgtcagtggcaccccaagaaacaatgcgggccgtgtggctgcgaggtaaagggtcgattcttccaaacgatcagccatcaactaccgccagtgagcgtttggccgaggaagctcgccccaaacatgataacaatgccgccgacgacgccggcaaccagcccaagcgaagcccgcccgaacatccaggagatcccgatagcgacaatgccgagaacagcgagtgactggccgaacggaccaaggataaacgtgcatatattgttaaccattgtggcggggtcagtgccgccacccgcagattgcgctgcggcgggtccggatgaggaaatgctccatgcaattgcaccgcacaagcttggggcgcagctcgatatcacgcgcatcatcgcattcgagagcgagaggcgatttagatgtaaacggtatctctcaaagcatcgcatcaatgcgcacctccttagtataagtcgaataagacttgattgtcgtctgcggatttgccgttgtcctggtgtggcggtggcggagcgattaaaccgccagcgccatcctcctgcgagcggcgctgatatgacccccaaacatcccacgtctcttcggattttagcgcctcgtgatcgtcttttggaggctcgattaacgcgggcaccagcgattgagcagctgtttcaacttttcgcacgtagccgtttgcaaaaccgccgatgaaattaccggtgttgtaagcggagatcgcccgacgaagcgcaaattgcttctcgtcaatcgtttcgccgcctgcataacgacttttcagcatgtttgcagcggcagataatgatgtgcacgcctggagcgcaccgtcaggtgtcagaccgagcatagaaaaatttcgagagtttatttgcatgaggccaacatccagcgaatgccgtgcatcgagacggtgcctgacgacttgggttgcttggctgtgatcttgccagtgaagcgtttcgccggtcgtgttgtcatgaatcgctaaaggatcaaagcgactctccaccttagctatcgccgcaagcgtagatgtcgcaactgatggggcacacttgcgagcaacatggtcaaactcagcagatgagagtggcgtggcaaggctcgacgaacagaaggagaccatcaaggcaagagaaagcgaccccgatctcttaagcataccttatctccttagctcgcaactaacaccgcctctcccgttggaagaagtgcgttgttttatgttgaagattatcgggagggtcggttactcgaaaattttcaattgcttctttatgatttcaattgaagcgagaaacctcgcccggcgtcttggaacgcaacatggaccgagaaccgcgcatccatgactaagcaaccggatcgacctattcaggccgcagttggtcaggtcaggctcagaacgaaaatgctcggcgaggttacgctgtctgtaaacccattcgatgaacgggaagcttccttccgattgctcttggcaggaatattggcccatgcctgcttgcgctttgcaaatgctcttatcgcgttggtatcatatgccttgtccgccagcagaaacgcactctaagcgattatttgtaaaaatgtttcggtcatgcggcggtcatgggcttgacccgctgtcagcgcaagacggatcggtcaaccgtcggcatcgacaacagcgtgaatcttggtggtcaaaccgccacgggaacgtcccatacagccatcgtcttgatcccgctgtttcccgtcgccgcatgttggtggacgcggacacaggaactgtcaatcatgacgacattctatcgaaagccttggaaatcacactcagaatatgatcccagacgtctgcctcacgccatcgtacaaagcgattgtagcaggttgtacaggaaccgtatcgatcaggaacgtctgcccagggcgggcccgtccggaagcgccacaagatgacattgatcacccgcgtcaacgcgcggcacgcgacgcggcttatttgggaacaaaggactgaacaacagtccattcgaaatcggtgacatcaaagcggggacgggttatcagtggcctccaagtcaagcctcaatgaatcaaaatcagaccgatttgcaaacctgatttatgagtgtgcggcctaaatgatgaaatcgtccttctagatcgcctccgtggtgtagcaacacctcgcagtatcgccgtgctgaccttggccagggaattgactggcaagggtgctttcacatgaccgctcttttggccgcgatagatgatttcgttgctgctttgggcacgtagaaggagagaagtcatatcggagaaattcctcctggcgcgagagcctgctctatcgcgacggcatcccactgtcgggaacagaccggatcattcacgaggcgaaagtcgtcaacacatgcgttataggcatcttcccttgaaggatgatcttgttgctgccaatctggaggtgcggcagccgcaggcagatgcgatctcagcgcaacttgcggcaaaacatctcactcacctgaaaaccactagcgagtctcgcgatcagacgaaggccttttacttaacgacacaatatccgatgtctgcatcacaggcgtcgctatcccagtcaatactaaagcggtgcaggaactaaagattactgatgacttaggcgtgccacgaggcctgagacgacgcgcgtagacagttttttgaaatcattatcaaagtgatggcctccgctgaagcctatcacctctgcgccggtctgtcggagagatgggcaagcattattacggtcttcgcgcccgtacatgcattggacgattgcagggtcaatggatctgagatcatccagaggattgccgcccttaccttccgtttcgagttggagccagcccctaaatgagacgacatagtcgacttgatgtgacaatgccaagagagagatttgcttaacccgatttttttgctcaagcgtaagcctattgaagcttgccggcatgacgtccgcgccgaaagaatatcctacaagtaaaacattctgcacaccgaaatgcttggtgtagacatcgattatgtgaccaagatccttagcagtttcgcttggggaccgctccgaccagaaataccgaagtgaactgacgccaatgacaggaatcccttccgtctgcagataggtaccatcgatagatctgctgcctcgcgcgtttcggtgatgacggtgaaaacctctgacacatgcagctcccggagacggtcacagcttgtctgtaagcggatgccgggagcagacaagcccgtcagggcgcgtcagcgggtgttggcgggtgtcggggcgcagccatgacccagtcacgtagcgatagcggagtgtatactggcttaactatgcggcatcagagcagattgtactgagagtgcaccatatgcggtgtgaaataccgcacagatgcgtaaggagaaaataccgcatcaggcgctcttccgcttcctcgctcactgactcgctgcgctcggtcgttcggctgcggcgagcggtatcagctcactcaaaggcggtaatacggttatccacagaatcaggggataacgcaggaaagaacatgtgagcaaaaggccagcaaaaggccaggaaccgtaaaaaggccgcgttgctggcgtttttccataggctccgcccccctgacgagcatcacaaaaatcgacgctcaagtcagaggtggcgaaacccgacaggactataaagataccaggcgtttccccctggaagctccctcgtgcgctctcctgttccgaccctgccgcttaccggatacctgtccgcctttctcccttcgggaagcgtggcgctttctcatagctcacgctgtaggtatctcagttcggtgtaggtcgttcgctccaagctgggctgtgtgcacgaaccccccgttcagcccgaccgctgcgccttatccggtaactatcgtcttgagtccaacccggtaagacacgacttatcgccactggcagcagccactggtaacaggattagcagagcgaggtatgtaggcggtgctacagagttcttgaagtggtggcctaactacggctacactagaaggacagtatttggtatctgcgctctgctgaagccagttaccttcggaaaaagagttggtagctcttgatccggcaaacaaaccaccgctggtagcggtggtttttttgtttgcaagcagcagattacgcgcagaaaaaaaggatctcaagaagatcctttgatcttttctacggggtctgacgctcagtggaacgaaaactcacgttaagggattttggtcatgagattatcaaaaaggatcttcacctagatccttttaaattaaaaatgaagttttaaatcaatctaaagtatatatgagtaaacttggtctgacagttaccaatgcttaatcagtgaggcacctatctcagcgatctgtctatttcgttcatccatagttgcctgactccccgtcgtgtagataactacgatacgggagggcttaccatctggccccagtgctgcaatgataccgcgagacccacgctcaccggctccagatttatcagcaataaaccagccagccggaagggccgagcgcagaagtggtcctgcaactttatccgcctccatccagtctattaattgttgccgggaagctagagtaagtagttcgccagttaatagtttgcgcaacgttgttgccattgctgcagggggggggggggggggggacttccattgttcattccacggacaaaaacagagaaaggaaacgacagaggccaaaaagcctcgctttcagcacctgtcgtttcctttcttttcagagggtattttaaataaaaacattaagttatgacgaagaagaacggaaacgccttaaaccggaaaattttcataaatagcgaaaacccgcgaggtcgccgccccgtaacctgtcggatcaccggaaaggacccgtaaagtgataatgattatcatctacatatcacaacgtgcgtggaggccatcaaaccacgtcaaataatcaattatgacgcaggtatcgtattaattgatctgcatcaacttaacgtaaaaacaacttcagacaatacaaatcagcgacactgaatacggggcaacctcatgtcccccccccccccccccctgcaggcatcgtggtgtcacgctcgtcgtttggtatggcttcattcagctccggttcccaacgatcaaggcgagttacatgatcccccatgttgtgcaaaaaagcggttagctccttcggtcctccgatcgttgtcagaagtaagttggccgcagtgttatcactcatggttatggcagcactgcataattctcttactgtcatgccatccgtaagatgcttttctgtgactggtgagtactcaaccaagtcattctgagaatagtgtatgcggcgaccgagttgctcttgcccggcgtcaacacgggataataccgcgccacatagcagaactttaaaagtgctcatcattggaaaacgttcttcggggcgaaaactctcaaggatcttaccgctgttgagatccagttcgatgtaacccactcgtgcacccaactgatcttcagcatcttttactttcaccagcgtttctgggtgagcaaaaacaggaaggcaaaatgccgcaaaaaagggaataagggcgacacggaaatgttgaatactcatactcttcctttttcaatattattgaagcatttatcagggttattgtctcatgagcggatacatatttgaatgtatttagaaaaataaacaaataggggttccgcgcacatttccccgaaaagtgccacctgacgtctaagaaaccattattatcatgacattaacctataaaaataggcgtatcacgaggccctttcgtcttcaagaattggtcgacgatcttgctgcgttcggatattttcgtggagttcccgccacagacccggattgaaggcgagatccagcaactcgcgccagatcatcctgtgacggaactttggcgcgtgatgactggccaggacgtcggccgaaagagcgacaagcagatcacgcttttcgacagcgtcggatttgcgatcgaggatttttcggcgctgcgctacgtccgcgaccgcgttgagggatcaagccacagcagcccactcgaccttctagccgacccagacgagccaagggatctttttggaatgctgctccgtcgtcaggctttccgacgtttgggtggttgaacagaagtcattatcgtacggaatgccaagcactcccgaggggaaccctgtggttggcatgcacatacaaatggacgaacggataaaccttttcacgcccttttaaatatccgttattctaataaacgctcttttctcttaggtttacccgccaatatatcctgtcaaacactgatagtttaaactgaaggcgggaaacgacaatctgatcatgagcggagaattaagggagtcacgttatgacccccgccgatgacgcgggacaagccgttttacgtttggaactgacagaaccgcaacgttgaaggagccactcagcaagctggtacgattgtaatacgactcactatagggcgaattgagcgctgtttaaacgctcttcaactggaagagcggttacccggaccgaagcttgaagttcctattccgaagttcctattctctagaaagtataggaacttcagatctcgatgctcaccctgttgtttggtgttacttctgcaggtcgactctagaggatccaccatgagcccagaacgacgcccggccgacatccgccgtgccaccgaggcggacatgccggcggtctgcaccatcgtcaaccactacatcgagacaagcacggtcaacttccgtaccgagccgcaggaaccgcaggactggacggacgacctcgtccgtctgcgggagcgctatccctggctcgtcgccgaggtggacggcgaggtcgccggcatcgcctacgcgggcccctggaaggcacgcaacgcctacgactggacggccgagtcgaccgtgtacgtctccccccgccaccagcggacgggactgggctccacgctctacacccacctgctgaagtccctggaggcacagggcttcaagagcgtggtcgctgtcatcgggctgcccaacgacccgagcgtgcgcatgcacgaggcgctcggatatgccccccgcggcatgctgcgggcggccggcttcaagcacgggaactggcatgacgtgggtttctggcagctggacttcagcctgccggtaccgccccgtccggtcctgcccgtcaccgagatctgatccgtcgaccaacctagacttgtccatcttctggattggccaacttaattaatgtatgaaataaaaggatgcacacatagtgacatgctaatcactataatgtgggcatcaaagttgtgtgttatgtgtaattactagttatctgaataaaagagaaagagatcatccatatttcttatcctaaatgaatgtcacgtgtctttataattctttgatgaaccagatgcatttcattaaccaaatccatatacatataaatattaatcatatataattaatatcaattgggttagcaaaacaaatctagtctaggtgtgttttgcgaattgcggccgcgatctggggaattcccatggacaccggtaattcccatgatcttctctccttcatcaatggatgccatgtttcataacaataacaccaaatgtttgatgagctaccaacaattgcgcaaagactatggctaagctcgagctcgctcgctacaagttgttgactttcaaatacaagtttgtttttggaacaccaaatattctacatgatctttcactaagttgcgcaccactatcaaaagattatctaggccattattcaagtaaagagtgaacacgtctaagacccacaaccacaccaaatagaatacgcatacatgcaacatattgtgcaagaagtatccaactggactcccatgtattctaaaactattttcgtagagttaaagttatgacaaacttatcaaataaaaatttgaacgctggaccaaaactttcatctttcaaatccaccatcgtctatcctcataaattgttttgattataacacatctacgtaaatcatttgttttgaacaatactaatttaattttattaagtcaaataacctgcttagaaaataatccctccacctcatttaacaatttcttgtcaaacacacaccaagaaaaaaattaatgaaagagaaaagaaatgaaaaggacatggagttgaatactagcaaaattgattgaaggaagattcacaattgaaattgaaaccatttaatttattttcgggtccataataataaattggtaagaataaaaacccgatcaagtccggtacagtacaattccactccaccaactccttacttaaacccctatttatacccactctcatcctcactcttccttcacctctcacactctcttctctctctcaaaaccctcacacaaacgctgcgtttagtgtaagaaattcaatccggcgccttggcgcgccgatcatccacaagtttgtacaaaaaagctgaacgagaaacgtaaaatgatataaatatcaatatattaaattagattttgcataaaaaacagactacataatactgtaaaacacaacatatccagtcactatggcggccgcattaggcaccccaggctttacactttatgcttccggctcgtataatgtgtggattttgagttaggatttaaatacgcgttgatccggcttactaaaagccagataacagtatgcgtatttgcgcgctgatttttgcggtataagaatatatactgatatgtatacccgaagtatgtcaaaaagaggtatgctatgaagcagcgtattacagtgacagttgacagcgacagctatcagttgctcaaggcatatatgatgtcaatatctccggtctggtaagcacaaccatgcagaatgaagcccgtcgtctgcgtgccgaacgctggaaagcggaaaatcaggaagggatggctgaggtcgcccggtttattgaaatgaacggctcttttgctgacgagaacaggggctggtgaaatgcagtttaaggtttacacctataaaagagagagccgttatcgtctgtttgtggatgtacagagtgatatcattgacacgcccggtcgacggatggtgatccccctggccagtgcacgtctgctgtcagataaagtctcccgtgaactttacccggtggtgcatatcggggatgaaagctggcgcatgatgaccaccgatatggccagtgtgccggtctccgttatcggggaagaagtggctgatctcagccaccgcgaaaatgacatcaaaaacgccattaacctgatgttctggggaatataaatgtcaggctcccttatacacagccagtctgcaggtcgaccatagtgactggatatgttgtgttttacagtattatgtagtctgttttttatgcaaaatctaatttaatatattgatatttatatcattttacgtttctcgttcagctttcttgtacaaagtggtgttaacctagacttgtccatcttctggattggccaacttaattaatgtatgaaataaaaggatgcacacatagtgacatgctaatcactataatgtgggcatcaaagttgtgtgttatgtgtaattactagttatctgaataaaagagaaagagatcatccatatttcttatcctaaatgaatgtcacgtgtctttataattctttgatgaaccagatgcatttcattaaccaaatccatatacatataaatattaatcatatataattaatatcaattgggttagcaaaacaaatctagtctaggtgtgttttgcgaattgcggccgccaccgcggtggagctcgaattccggtccgggtcacctttgtccaccaagatggaactgcggccgctcattaattaagtcaggcgcgcctctagttgaagacacgttcatgtcttcatcgtaagaagacactcagtagtcttcggccagaatggccatctggattcagcaggcctagaaggccatttaaatcctgaggatctggtcttcctaaggacccgggatatcggaccgattaaactttaattcggtccgaagcttgaagttcctattccgaagttcctattctccagaaagtataggaacttcgcatgcctgcagtgcagcgtgacccggtcgtgcccctctctagagataatgagcattgcatgtctaagttataaaaaattaccacatattttttttgtcacacttgtttgaagtgcagtttatctatctttatacatatatttaaactttactctacgaataatataatctatagtactacaataatatcagtgttttagagaatcatataaatgaacagttagacatggtctaaaggacaattgagtattttgacaacaggactctacagttttatctttttagtgtgcatgtgttctcctttttttttgcaaatagcttcacctatataatacttcatccattttattagtacatccatttagggtttagggttaatggtttttatagactaatttttttagtacatctattttattctattttagcctctaaattaagaaaactaaaactctattttagtttttttatttaataatttagatataaaatagaataaaataaagtgactaaaaattaaacaaataccctttaagaaattaaaaaaactaaggaaacatttttcttgtttcgagtagataatgccagcctgttaaacgccgtcgacgagtctaacggacaccaaccagcgaaccagcagcgtcgcgtcgggccaagcgaagcagacggcacggcatctctgtcgctgcctctggacccctctcgagagttccgctccaccgttggacttgctccgctgtcggcatccagaaattgcgtggcggagcggcagacgtgagccggcacggcaggcggcctcctcctcctctcacggcaccggcagctacgggggattcctttcccaccgctccttcgctttcccttcctcgcccgccgtaataaatagacaccccctccacaccctctttccccaacctcgtgttgttcggagcgcacacacacacaaccagatctcccccaaatccacccgtcggcacctccgcttcaaggtacgccgctcgtcctcccccccccccctctctaccttctctagatcggcgttccggtccatgcatggttagggcccggtagttctacttctgttcatgtttgtgttagatccgtgtttgtgttagatccgtgctgctagcgttcgtacacggatgcgacctgtacgtcagacacgttctgattgctaacttgccagtgtttctctttggggaatcctgggatggctctagccgttccgcagacgggatcgatttcatgattttttttgtttcgttgcatagggtttggtttgcccttttcctttatttcaatatatgccgtgcacttgtttgtcgggtcatcttttcatgcttttttttgtcttggttgtgatgatgtggtctggttgggcggtcgttctagatcggagtagaattctgtttcaaactacctggtggatttattaattttggatctgtatgtgtgtgccatacatattcatagttacgaattgaagatgatggatggaaatatcgatctaggataggtatacatgttgatgcgggttttactgatgcatatacagagatgctttttgttcgcttggttgtgatgatgtggtgtggttgggcggtcgttcattcgttctagatcggagtagaatactgtttcaaactacctggtgtatttattaattttggaactgtatgtgtgtgtcatacatcttcatagttacgagtttaagatggatggaaatatcgatctaggataggtatacatgttgatgtgggttttactgatgcatatacatgatggcatatgcagcatctattcatatgctctaaccttgagtacctatctattataataaacaagtatgttttataattattttgatcttgatatacttggatgatggcatatgcagcagctatatgtggatttttttagccctgccttcatacgctatttatttgcttggtactgtttcttttgtcgatgctcaccctgttgtttggtgttacttctgcaggtcgactttaacttagcctaggatccacacgacaccatgatagaggtgaaaccgattaacgcagaggatacctatgaactaaggcatagaatactcagaccaaaccagccgatagaagcgtgtatgtttgaaagcgatttacttcgtggtgcatttcacttaggcggctattacgggggcaaactgatttccatagcttcattccaccaggccgagcactcagaactccaaggccagaaacagtaccagctccgaggtatggctaccttggaaggttatcgtgagcagaaggcgggatcgagtctaattaaacacgctgaagaaattcttcgtaagaggggggcggacttgctttggtgtaatgcgcggacatccgcctcaggctactacaaaaagttaggcttcagcgagcagggagaggtattcgacacgccgccagtaggacctcacatcctgatgtataaaaggatcacataactagctagtcagttaacctagacttgtccatcttctggattggccaacttaattaatgtatgaaataaaaggatgcacacatagtgacatgctaatcactataatgtgggcatcaaagttgtgtgttatgtgtaattactagttatctgaataaaagagaaagagatcatccatatttcttatcctaaatgaatgtcacgtgtctttataattctttgatgaaccagatgcatttcattaaccaaatccatatacatataaatattaatcatatataattaatatcaattgggttagcaaaacaaatctagtctaggtgtgttttgcgaattcagagctcgaattcattccgattaatcgtggcctcttgctcttcaggatgaagagctatgtttaaacgtgcaagcgctactagacaattcagtacattaaaaacgtccgcaatgtgttattaagttgtctaagcgtcaatttgtttacaccacaatatatcctgccaccagccagccaacagctccccgaccggcagctcggcacaaaatcaccactcgatacaggcagcccatcagtccgggacggcgtcagcgggagagccgttgtaaggcggcagactttgctcatgttaccgatgctattcggaagaacggcaactaagctgccgggtttgaaacacggatgatctcgcggagggtagcatgttgattgtaacgatgacagagcgttgctgcctgtgatcaaatatcatctccctcgcagagatccgaattatcagccttcttattcatttctcgcttaaccgtgacaggctgtcgatcttgagaactatgccgacataataggaaatcgctggataaagccgctgaggaagctgagtggcgctatttctttagaagtgaacgttgacgatcgtcgaccgtaccccgatgaattaattcggacgtacgttctgaacacagctggatacttacttgggcgattgtcatacatgacatcaacaatgtacccgtttgtgtaaccgtctcttggaggttcgtatgacactagtggttcccctcagcttgcgactagatgttgaggcctaacattttattagagagcaggctagttgcttagatacatgatcttcaggccgttatctgtcagggcaagcgaaaattggccatttatgacgaccaatgccccgcagaagctcccatctttgccgccatagacgccgcgccccccttttggggtgtagaacatccttttgccagatgtggaaaagaagttcgttgtcccattgttggcaatgacgtagtagccggcgaaagtgcgagacccatttgcgctatatataagcctacgatttccgttgcgactattgtcgtaattggatgaactattatcgtagttgctctcagagttgtcgtaatttgatggactattgtcgtaattgcttatggagttgtcgtagttgcttggagaaatgtcgtagttggatggggagtagtcatagggaagacgagcttcatccactaaaacaattggcaggtcagcaagtgcctgccccgatgccatcgcaagtacgaggcttagaaccaccttcaacagatcgcgcatagtcttccccagctctctaacgcttgagttaagccgcgccgcgaagcggcgtcggcttgaacgaattgttagacattatttgccgactaccttggtgatctcgcctttcacgtagtgaacaaattcttccaactgatctgcgcgcgaggccaagcgatcttcttgtccaagataagcctgcctagcttcaagtatgacgggctgatactgggccggcaggcgctccattgcccagtcggcagcgacatccttcggcgcgattttgccggttactgcgctgtaccaaatgcgggacaacgtaagcactacatttcgctcatcgccagcccagtcgggcggcgagttccatagcgttaaggtttcatttagcgcctcaaatagatcctgttcaggaaccggatcaaagagttcctccgccgctggacctaccaaggcaacgctatgttctcttgcttttgtcagcaagatagccagatcaatgtcgatcgtggctggctcgaagatacctgcaagaatgtcattgcgctgccattctccaaattgcagttcgcgcttagctggataacgccacggaatgatgtcgtcgtgcacaacaatggtgacttctacagcgcggagaatctcgctctctccaggggaagccgaagtttccaaaaggtcgttgatcaaagctcgccgcgttgtttcatcaagccttacagtcaccgtaaccagcaaatcaatatcactgtgtggcttcaggccgccatccactgcggagccgtacaaatgtacggccagcaacgtcggttcgagatggcgctcgatgacgccaactacctctgatagttgagtcgatacttcggcgatcaccgcttccctcatgatgtttaactcctgaattaagccgcgccgcgaagcggtgtcggcttgaatgaattgttaggcgtcatcctgtgctcccgagaaccagtaccagtacatcgctgtttcgttcgagacttgaggtctagttttatacgtgaacaggtcaatgccgccgagagtaaagccacattttgcgtacaaattgcaggcaggtacattgttcgtttgtgtctctaatcgtatgccaaggagctgtctgcttagtgcccactttttcgcaaattcgatgagactgtgcgcgactcctttgcctcggtgcgtgtgcgacacaacaatgtgttcgatagaggctagatcgttccatgttgagttgagttcaatcttcccgacaagctcttggtcgatgaatgcgccatagcaagcagagtcttcatcagagtcatcatccgagatgtaatccttccggtaggggctcacacttctggtagatagttcaaagccttggtcggataggtgcacatcgaacacttcacgaacaatgaaatggttctcagcatccaatgtttccgccacctgctcagggatcaccgaaatcttcatatgacgcctaacgcctggcacagcggatcgcaaacctggcgcggcttttggcacaaaaggcgtgacaggtttgcgaatccgttgctgccacttgttaacccttttgccagatttggtaactataatttatgttagaggcgaagtcttgggtaaaaactggcctaaaattgctggggatttcaggaaagtaaacatcaccttccggctcgatgtctattgtagatatatgtagtgtatctacttgatcgggggatctgctgcctcgcgcgtttcggtgatgacggtgaaaacctctgacacatgcagctcccggagacggtcacagcttgtctgtaagcggatgccgggagcagacaagcccgtcagggcgcgtcagcgggtgttggcgggtgtcggggcgcagccatgacccagtcacgtagcgatagcggagtgtatactggcttaactatgcggcatcagagcagattgtactgagagtgcaccatatgcggtgtgaaataccgcacagatgcgtaaggagaaaataccgcatcaggcgctcttccgcttcctcgctcactgactcgctgcgctcggtcgttcggctgcggcgagcggtatcagctcactcaaaggcggtaatacggttatccacagaatcaggggataacgcaggaaagaacatgtgagcaaaaggccagcaaaaggccaggaaccgtaaaaaggccgcgttgctggcgtttttccataggctccgcccccctgacgagcatcacaaaaatcgacgctcaagtcagaggtggcgaaacccgacaggactataaagataccaggcgtttccccctggaagctccctcgtgcgctctcctgttccgaccctgccgcttaccggatacctgtccgcctttctcccttcgggaagcgtggcgctttctcatagctcacgctgtaggtatctcagttcggtgtaggtcgttcgctccaagctgggctgtgtgcacgaaccccccgttcagcccgaccgctgcgccttatccggtaactatcgtcttgagtccaacccggtaagacacgacttatcgccactggcagcagccactggtaacaggattagcagagcgaggtatgtaggcggtgctacagagttcttgaagtggtggcctaactacggctacactagaaggacagtatttggtatctgcgctctgctgaagccagttaccttcggaaaaagagttggtagctcttgatccggcaaacaaaccaccgctggtagcggtggtttttttgtttgcaagcagcagattacgcgcagaaaaaaaggatctcaagaagatcctttgatcttttctacggggtctgacgctcagtggaacgaaaactcacgttaagggattttggtcatgagattatcaaaaaggatcttcacctagatccttttaaattaaaaatgaagttttaaatcaatctaaagtatatatgagtaaacttggtctgacagttaccaatgcttaatcagtgaggcacctatctcagcgatctgtctatttcgttcatccatagttgcctgactccccgtcgtgtagataactacgatacgggagggcttaccatctggccccagtgctgcaatgataccgcgagacccacgctcaccggctccagatttatcagcaataaaccagccagccggaagggccgagcgcagaagtggtcctgcaactttatccgcctccatccagtctattaattgttgccgggaagctagagtaagtagttcgccagttaatagtttgcgcaacgttgttgccattgctgca

SEQ ID NO: 14 - DNA, 29 bp, artificial sequence
  primer
ggggacaagtttgtacaaaaaagcaggct

SEQ ID NO: 15 - DNA, 29 bp, artificial sequence
  primer
ggggaccactttgtacaagaaagctgggt

SEQ ID NO: 16 - DNA, 54 bp, artificial sequence
  primer
ttaaacaagtttgtacaaaaaagcaggctgcaattaaccctcactaaagggaac

SEQ ID NO: 17 - DNA, 53 bp, artificial sequence
  primer
ttaaaccactttgtacaagaaagctgggtgcgtaatacgactcactatagggc

SEQ ID NO: 18 - DNA, 12856 bp, artificial sequence
  vector
cgccttggcgcgccgatcatccacaagtttgtacaaaaaagctgaacgagaaacgtaaaatgatataaatatcaatatattaaattagattttgcataaaaaacagactacataatactgtaaaacacaacatatccagtcactatggcggccgcattaggcaccccaggctttacactttatgcttccggctcgtataatgtgtggattttgagttaggatttaaatacgcgttgatccggcttactaaaagccagataacagtatgcgtatttgcgcgctgatttttgcggtataagaatatatactgatatgtatacccgaagtatgtcaaaaagaggtatgctatgaagcagcgtattacagtgacagttgacagcgacagctatcagttgctcaaggcatatatgatgtcaatatctccggtctggtaagcacaaccatgcagaatgaagcccgtcgtctgcgtgccgaacgctggaaagcggaaaatcaggaagggatggctgaggtcgcccggtttattgaaatgaacggctcttttgctgacgagaacaggggctggtgaaatgcagtttaaggtttacacctataaaagagagagccgttatcgtctgtttgtggatgtacagagtgatatcattgacacgcccggtcgacggatggtgatccccctggccagtgcacgtctgctgtcagataaagtctcccgtgaactttacccggtggtgcatatcggggatgaaagctggcgcatgatgaccaccgatatggccagtgtgccggtctccgttatcggggaagaagtggctgatctcagccaccgcgaaaatgacatcaaaaacgccattaacctgatgttctggggaatataaatgtcaggctcccttatacacagccagtctgcaggtcgaccatagtgactggatatgttgtgttttacagtattatgtagtctgttttttatgcaaaatctaatttaatatattgatatttatatcattttacgtttctcgttcagctttcttgtacaaagtggtgttaacctagacttgtccatcttctggattggccaacttaattaatgtatgaaataaaaggatgcacacatagtgacatgctaatcactataatgtgggcatcaaagttgtgtgttatgtgtaattactagttatctgaataaaagagaaagagatcatccatatttcttatcctaaatgaatgtcacgtgtctttataattctttgatgaaccagatgcatttcattaaccaaatccatatacatataaatattaatcatatataattaatatcaattgggttagcaaaacaaatctagtctaggtgtgttttgcgaattgcggccgccaccgcggtggagctcgaattccggtccgggtcacctttgtccaccaagatggaactgcggccgctcattaattaagtcaggcgcgcctctagttgaagacacgttcatgtcttcatcgtaagaagacactcagtagtcttcggccagaatggccatctggattcagcaggcctagaaggccatttaaatcctgaggatctggtcttcctaaggacccgggatatcggaccgattaaactttaattcggtccgaagcttgaagttcctattccgaagttcctattctccagaaagtataggaacttcgcatgcctgcagtgcagcgtgacccggtcgtgcccctctctagagataatgagcattgcatgtctaagttataaaaaattaccacatattttttttgtcacacttgtttgaagtgcagtttatctatctttatacatatatttaaactttactctacgaataatataatctatagtactacaataatatcagtgttttagagaatcatataaatgaacagttagacatggtctaaaggacaattgagtattttgacaacaggactctacagttttatctttttagtgtgcatgtgttctcctttttttttgcaaatagcttcacctatataatacttcatccattttattagtacatccatttagggtttagggttaatggtttttatagactaatttttttagtacatctattttattctattttagcctctaaattaagaaaactaaaactctattttagtttttttatttaataatttagatataaaatagaataaaataaagtgactaaaaattaaacaaataccctttaagaaattaaaaaaactaaggaaacatttttcttgtttcgagtagataatgccagcctgttaaacgccgtcgacgagtctaacggacaccaaccagcgaaccagcagcgtcgcgtcgggccaagcgaagcagacggcacggcatctctgtcgctgcctctggacccctctcgagagttccgctccaccgttggacttgctccgctgtcggcatccagaaattgcgtggcggagcggcagacgtgagccggcacggcaggcggcctcctcctcctctcacggcaccggcagctacgggggattcctttcccaccgctccttcgctttcccttcctcgcccgccgtaataaatagacaccccctccacaccctctttccccaacctcgtgttgttcggagcgcacacacacacaaccagatctcccccaaatccacccgtcggcacctccgcttcaaggtacgccgctcgtcctcccccccccccctctctaccttctctagatcggcgttccggtccatgcatggttagggcccggtagttctacttctgttcatgtttgtgttagatccgtgtttgtgttagatccgtgctgctagcgttcgtacacggatgcgacctgtacgtcagacacgttctgattgctaacttgccagtgtttctctttggggaatcctgggatggctctagccgttccgcagacgggatcgatttcatgattttttttgtttcgttgcatagggtttggtttgcccttttcctttatttcaatatatgccgtgcacttgtttgtcgggtcatcttttcatgcttttttttgtcttggttgtgatgatgtggtctggttgggcggtcgttctagatcggagtagaattctgtttcaaactacctggtggatttattaattttggatctgtatgtgtgtgccatacatattcatagttacgaattgaagatgatggatggaaatatcgatctaggataggtatacatgttgatgcgggttttactgatgcatatacagagatgctttttgttcgcttggttgtgatgatgtggtgtggttgggcggtcgttcattcgttctagatcggagtagaatactgtttcaaactacctggtgtatttattaattttggaactgtatgtgtgtgtcatacatcttcatagttacgagtttaagatggatggaaatatcgatctaggataggtatacatgttgatgtgggttttactgatgcatatacatgatggcatatgcagcatctattcatatgctctaaccttgagtacctatctattataataaacaagtatgttttataattattttgatcttgatatacttggatgatggcatatgcagcagctatatgtggatttttttagccctgccttcatacgctatttatttgcttggtactgtttcttttgtcgatgctcaccctgttgtttggtgttacttctgcaggtcgactttaacttagcctaggatccacacgacaccatgatagaggtgaaaccgattaacgcagaggatacctatgaactaaggcatagaatactcagaccaaaccagccgatagaagcgtgtatgtttgaaagcgatttacttcgtggtgcatttcacttaggcggctattacgggggcaaactgatttccatagcttcattccaccaggccgagcactcagaactccaaggccagaaacagtaccagctccgaggtatggctaccttggaaggttatcgtgagcagaaggcgggatcgagtctaattaaacacgctgaagaaattcttcgtaagaggggggcggacttgctttggtgtaatgcgcggacatccgcctcaggctactacaaaaagttaggcttcagcgagcagggagaggtattcgacacgccgccagtaggacctcacatcctgatgtataaaaggatcacataactagctagtcagttaacctagacttgtccatcttctggattggccaacttaattaatgtatgaaataaaaggatgcacacatagtgacatgctaatcactataatgtgggcatcaaagttgtgtgttatgtgtaattactagttatctgaataaaagagaaagagatcatccatatttcttatcctaaatgaatgtcacgtgtctttataattctttgatgaaccagatgcatttcattaaccaaatccatatacatataaatattaatcatatataattaatatcaattgggttagcaaaacaaatctagtctaggtgtgttttgcgaattcagagctcgaattcattccgattaatcgtggcctcttgctcttcaggatgaagagctatgtttaaacgtgcaagcgctactagacaattcagtacattaaaaacgtccgcaatgtgttattaagttgtctaagcgtcaatttgtttacaccacaatatatcctgccaccagccagccaacagctccccgaccggcagctcggcacaaaatcaccactcgatacaggcagcccatcagtccgggacggcgtcagcgggagagccgttgtaaggcggcagactttgctcatgttaccgatgctattcggaagaacggcaactaagctgccgggtttgaaacacggatgatctcgcggagggtagcatgttgattgtaacgatgacagagcgttgctgcctgtgatcaaatatcatctccctcgcagagatccgaattatcagccttcttattcatttctcgcttaaccgtgacaggctgtcgatcttgagaactatgccgacataataggaaatcgctggataaagccgctgaggaagctgagtggcgctatttctttagaagtgaacgttgacgatcgtcgaccgtaccccgatgaattaattcggacgtacgttctgaacacagctggatacttacttgggcgattgtcatacatgacatcaacaatgtacccgtttgtgtaaccgtctcttggaggttcgtatgacactagtggttcccctcagcttgcgactagatgttgaggcctaacattttattagagagcaggctagttgcttagatacatgatcttcaggccgttatctgtcagggcaagcgaaaattggccatttatgacgaccaatgccccgcagaagctcccatctttgccgccatagacgccgcgccccccttttggggtgtagaacatccttttgccagatgtggaaaagaagttcgttgtcccattgttggcaatgacgtagtagccggcgaaagtgcgagacccatttgcgctatatataagcctacgatttccgttgcgactattgtcgtaattggatgaactattatcgtagttgctctcagagttgtcgtaatttgatggactattgtcgtaattgcttatggagttgtcgtagttgcttggagaaatgtcgtagttggatggggagtagtcatagggaagacgagcttcatccactaaaacaattggcaggtcagcaagtgcctgccccgatgccatcgcaagtacgaggcttagaaccaccttcaacagatcgcgcatagtcttccccagctctctaacgcttgagttaagccgcgccgcgaagcggcgtcggcttgaacgaattgttagacattatttgccgactaccttggtgatctcgcctttcacgtagtgaacaaattcttccaactgatctgcgcgcgaggccaagcgatcttcttgtccaagataagcctgcctagcttcaagtatgacgggctgatactgggccggcaggcgctccattgcccagtcggcagcgacatccttcggcgcgattttgccggttactgcgctgtaccaaatgcgggacaacgtaagcactacatttcgctcatcgccagcccagtcgggcggcgagttccatagcgttaaggtttcatttagcgcctcaaatagatcctgttcaggaaccggatcaaagagttcctccgccgctggacctaccaaggcaacgctatgttctcttgcttttgtcagcaagatagccagatcaatgtcgatcgtggctggctcgaagatacctgcaagaatgtcattgcgctgccattctccaaattgcagttcgcgcttagctggataacgccacggaatgatgtcgtcgtgcacaacaatggtgacttctacagcgcggagaatctcgctctctccaggggaagccgaagtttccaaaaggtcgttgatcaaagctcgccgcgttgtttcatcaagccttacagtcaccgtaaccagcaaatcaatatcactgtgtggcttcaggccgccatccactgcggagccgtacaaatgtacggccagcaacgtcggttcgagatggcgctcgatgacgccaactacctctgatagttgagtcgatacttcggcgatcaccgcttccctcatgatgtttaactcctgaattaagccgcgccgcgaagcggtgtcggcttgaatgaattgttaggcgtcatcctgtgctcccgagaaccagtaccagtacatcgctgtttcgttcgagacttgaggtctagttttatacgtgaacaggtcaatgccgccgagagtaaagccacattttgcgtacaaattgcaggcaggtacattgttcgtttgtgtctctaatcgtatgccaaggagctgtctgcttagtgcccactttttcgcaaattcgatgagactgtgcgcgactcctttgcctcggtgcgtgtgcgacacaacaatgtgttcgatagaggctagatcgttccatgttgagttgagttcaatcttcccgacaagctcttggtcgatgaatgcgccatagcaagcagagtcttcatcagagtcatcatccgagatgtaatccttccggtaggggctcacacttctggtagatagttcaaagccttggtcggataggtgcacatcgaacacttcacgaacaatgaaatggttctcagcatccaatgtttccgccacctgctcagggatcaccgaaatcttcatatgacgcctaacgcctggcacagcggatcgcaaacctggcgcggcttttggcacaaaaggcgtgacaggtttgcgaatccgttgctgccacttgttaacccttttgccagatttggtaactataatttatgttagaggcgaagtcttgggtaaaaactggcctaaaattgctggggatttcaggaaagtaaacatcaccttccggctcgatgtctattgtagatatatgtagtgtatctacttgatcgggggatctgctgcctcgcgcgtttcggtgatgacggtgaaaacctctgacacatgcagctcccggagacggtcacagcttgtctgtaagcggatgccgggagcagacaagcccgtcagggcgcgtcagcgggtgttggcgggtgtcggggcgcagccatgacccagtcacgtagcgatagcggagtgtatactggcttaactatgcggcatcagagcagattgtactgagagtgcaccatatgcggtgtgaaataccgcacagatgcgtaaggagaaaataccgcatcaggcgctcttccgcttcctcgctcactgactcgctgcgctcggtcgttcggctgcggcgagcggtatcagctcactcaaaggcggtaatacggttatccacagaatcaggggataacgcaggaaagaacatgtgagcaaaaggccagcaaaaggccaggaaccgtaaaaaggccgcgttgctggcgtttttccataggctccgcccccctgacgagcatcacaaaaatcgacgctcaagtcagaggtggcgaaacccgacaggactataaagataccaggcgtttccccctggaagctccctcgtgcgctctcctgttccgaccctgccgcttaccggatacctgtccgcctttctcccttcgggaagcgtggcgctttctcatagctcacgctgtaggtatctcagttcggtgtaggtcgttcgctccaagctgggctgtgtgcacgaaccccccgttcagcccgaccgctgcgccttatccggtaactatcgtcttgagtccaacccggtaagacacgacttatcgccactggcagcagccactggtaacaggattagcagagcgaggtatgtaggcggtgctacagagttcttgaagtggtggcctaactacggctacactagaaggacagtatttggtatctgcgctctgctgaagccagttaccttcggaaaaagagttggtagctcttgatccggcaaacaaaccaccgctggtagcggtggtttttttgtttgcaagcagcagattacgcgcagaaaaaaaggatctcaagaagatcctttgatcttttctacggggtctgacgctcagtggaacgaaaactcacgttaagggattttggtcatgagattatcaaaaaggatcttcacctagatccttttaaattaaaaatgaagttttaaatcaatctaaagtatatatgagtaaacttggtctgacagttaccaatgcttaatcagtgaggcacctatctcagcgatctgtctatttcgttcatccatagttgcctgactccccgtcgtgtagataactacgatacgggagggcttaccatctggccccagtgctgcaatgataccgcgagacccacgctcaccggctccagatttatcagcaataaaccagccagccggaagggccgagcgcagaagtggtcctgcaactttatccgcctccatccagtctattaattgttgccgggaagctagagtaagtagttcgccagttaatagtttgcgcaacgttgttgccattgctgcagggggggggggggggggggacttccattgttcattccacggacaaaaacagagaaaggaaacgacagaggccaaaaagcctcgctttcagcacctgtcgtttcctttcttttcagagggtattttaaataaaaacattaagttatgacgaagaagaacggaaacgccttaaaccggaaaattttcataaatagcgaaaacccgcgaggtcgccgccccgtaacctgtcggatcaccggaaaggacccgtaaagtgataatgattatcatctacatatcacaacgtgcgtggaggccatcaaaccacgtcaaataatcaattatgacgcaggtatcgtattaattgatctgcatcaacttaacgtaaaaacaacttcagacaatacaaatcagcgacactgaatacggggcaacctcatgtcccccccccccccccccctgcaggcatcgtggtgtcacgctcgtcgtttggtatggcttcattcagctccggttcccaacgatcaaggcgagttacatgatcccccatgttgtgcaaaaaagcggttagctccttcggtcctccgatcgttgtcagaagtaagttggccgcagtgttatcactcatggttatggcagcactgcataattctcttactgtcatgccatccgtaagatgcttttctgtgactggtgagtactcaaccaagtcattctgagaatagtgtatgcggcgaccgagttgctcttgcccggcgtcaacacgggataataccgcgccacatagcagaactttaaaagtgctcatcattggaaaacgttcttcggggcgaaaactctcaaggatcttaccgctgttgagatccagttcgatgtaacccactcgtgcacccaactgatcttcagcatcttttactttcaccagcgtttctgggtgagcaaaaacaggaaggcaaaatgccgcaaaaaagggaataagggcgacacggaaatgttgaatactcatactcttcctttttcaatattattgaagcatttatcagggttattgtctcatgagcggatacatatttgaatgtatttagaaaaataaacaaataggggttccgcgcacatttccccgaaaagtgccacctgacgtctaagaaaccattattatcatgacattaacctataaaaataggcgtatcacgaggccctttcgtcttcaagaattggtcgacgatcttgctgcgttcggatattttcgtggagttcccgccacagacccggattgaaggcgagatccagcaactcgcgccagatcatcctgtgacggaactttggcgcgtgatgactggccaggacgtcggccgaaagagcgacaagcagatcacgcttttcgacagcgtcggatttgcgatcgaggatttttcggcgctgcgctacgtccgcgaccgcgttgagggatcaagccacagcagcccactcgaccttctagccgacccagacgagccaagggatctttttggaatgctgctccgtcgtcaggctttccgacgtttgggtggttgaacagaagtcattatcgtacggaatgccaagcactcccgaggggaaccctgtggttggcatgcacatacaaatggacgaacggataaaccttttcacgcccttttaaatatccgttattctaataaacgctcttttctcttaggtttacccgccaatatatcctgtcaaacactgatagtttaaactgaaggcgggaaacgacaatctgatcatgagcggagaattaagggagtcacgttatgacccccgccgatgacgcgggacaagccgttttacgtttggaactgacagaaccgcaacgttgaaggagccactcagcaagctggtacgattgtaatacgactcactatagggcgaattgagcgctgtttaaacgctcttcaactggaagagcggttacccggaccgaagcttgaagttcctattccgaagttcctattctctagaaagtataggaacttcagatctcgatgctcaccctgttgtttggtgttacttctgcaggtcgactctagaggatccaccatgagcccagaacgacgcccggccgacatccgccgtgccaccgaggcggacatgccggcggtctgcaccatcgtcaaccactacatcgagacaagcacggtcaacttccgtaccgagccgcaggaaccgcaggactggacggacgacctcgtccgtctgcgggagcgctatccctggctcgtcgccgaggtggacggcgaggtcgccggcatcgcctacgcgggcccctggaaggcacgcaacgcctacgactggacggccgagtcgaccgtgtacgtctccccccgccaccagcggacgggactgggctccacgctctacacccacctgctgaagtccctggaggcacagggcttcaagagcgtggtcgctgtcatcgggctgcccaacgacccgagcgtgcgcatgcacgaggcgctcggatatgccccccgcggcatgctgcgggcggccggcttcaagcacgggaactggcatgacgtgggtttctggcagctggacttcagcctgccggtaccgccccgtccggtcctgcccgtcaccgagatctgatccgtcgaccaacctagacttgtccatcttctggattggccaacttaattaatgtatgaaataaaaggatgcacacatagtgacatgctaatcactataatgtgggcatcaaagttgtgtgttatgtgtaattactagttatctgaataaaagagaaagagatcatccatatttcttatcctaaatgaatgtcacgtgtctttataattctttgatgaaccagatgcatttcattaaccaaatccatatacatataaatattaatcatatataattaatatcaattgggttagcaaaacaaatctagtctaggtgtgttttgcgaattgcggccgcgatctggggaattcccatggacaccggtaattcccatgatcttctctccttcatcaatggatgccatgtttcataacaataacaccaaatgtttgatgagctaccaacaattgcgcaaagactatggctaagctcgagctcgctcgctacaagttgttgactttcaaatacaagtttgtttttggaacaccaaatattctacatgatctttcactaagttgcgcaccactatcaaaagattatctaggccattattcaagtaaagagtgaacacgtctaagacccacaaccacaccaaatagaatacgcatacatgcaacatattgtgcaagaagtatccaactggactcccatgtattctaaaactattttcgtagagttaaagttatgacaaacttatcaaataaaaatttgaacgctggaccaaaactttcatctttcaaatccaccatcgtctatcctcataaattgttttgattataacacatctacgtaaatcatttgttttgaacaatactaatttaattttattaagtcaaataacctgcttagaaaataatccctccacctcatttaacaatttcttgtcaaacacacaccaagaaaaaaattaatgaaagagaaaagaaatgaaaaggacatggagttgaatactagcaaaattgattgaaggaagattcacaattgaaattgaaaccatttaatttattttcgggtccataataataaattggtaagaataaaaacccgatcaagtccggtacagtacaattccactccaccaactccttacttaaacccctatttatacccactctcatcctcactcttccttcacctctcacactctcttctctctctcaaaaccctcacacaaacgctgcgtttagtgtaagaaattcaatccgg

SEQ ID NO: 19 - DNA, 825 bp, Zea mays
aaatccttacagaattgctgtagtttcatagtgctagatgtggacagcaaagcgccgctgtatgcttctgcttttcttttttggtgtgtgtagccacatcctttgttcctgcccggcgccatcccacttggttgtttttttttatgattgaaagccttcatgcttcctcggtcaatcaccggtgcgcactgggagcatcgccggaaaaaaaattcttcggctaagagtaacttctttctccttttcttctctgatctcgcgagcagtgctgataacgtgttgtaatctacttagcggtaacgagattgagagagacaaaatgacagaactattgtctttattgcagagtgtcatgtatttatacaggggatacaaagtctcccaaggggtgtgtcccttgggagtaactgccagttgatcacaggacaatattttgtaacaaaacgtacacatcgtcaaaatagcgaggcatgaaactggccttggccatggacgcgtgaagcgcgccatgcgttggatatgtggtcaataagtatatacaatacaatgtttaacagagctgatagtactgctttggcacatttttgtccacgcttcatgagagataaaacacctgcacgtaaattcacatgctgcactgaaggcccgatcactgaggagcgaactgccgtaactcccttctatatatacccccagtccctgtttcagttttcgtcaagctagcagcaccaagttgtcgatcacttgcctgctcttgagctcgattaagctatcatcagctacagcatccgatcccaaactgcaactgtagcagcgacaactgcc

SEQ ID NO: 20 - DNA, 860 bp, Zea mays
ctggtaattattggctgtaggattctaaacagagcctaaatagctggaatagctctagccctcaatccaaactaatgatatctatacttatgcaactctaaatttttattctaaaagtaatatttcatttttgtcaacgagattctctactctattccacaatcttttgaagcaatatttaccttaaatctgtactctataccaataatcatatattctattatttatttttatctctctcctaaggagcatccccctatgtctgcatggcccccgcctcgggtcccaatctcttgctctgctagtagcacagaagaaaacactagaaatgacttgcttgacttagagtatcagataaacatcatgtttacttaactttaatttgtatcggtttctactatttttataatatttttgtctctatagatactacgtgcaacagtataatcaacctagtttaatccagagcgaaggattttttactaagtacgtgactccatatgcacagcgttccttttatggttcctcactgggcacagcataaacgaaccctgtccaatgttttcagcgcgaacaaacagaaattccatcagcgaacaaacaacatacatgcgagatgaaaataaataataaaaaaagctccgtctcgataggccggcacgaatcgagagcctccatagccagttttttccatcggaacggcggttcgcgcacctaattatatgcaccacacgcctataaagccaaccaacccgtcggaggggcgcaagccagacagaagacagcccgtcagcccctctcgtttttcatccgccttcgcctccaaccgcgtgcgctccacgcctcctccaggaaagcga

SEQ ID NO: 21 - DNA, 899 bp, Zea mays
gtgcagcgtgacccggtcgtgcccctctctagagataatgagcattgcatgtctaagttataaaaaattaccacatattttttttgtcacacttgtttgaagtgcagtttatctatctttatacatatatttaaactttactctacgaataatataatctatagtactacaataatatcagtgttttagagaatcatataaatgaacagttagacatggtctaaaggacaattgagtattttgacaacaggactctacagttttatctttttagtgtgcatgtgttctcctttttttttgcaaatagcttcacctatataatacttcatccattttattagtacatccatttagggtttagggttaatggtttttatagactaatttttttagtacatctattttattctattttagcctctaaattaagaaaactaaaactctattttagtttttttatttaataatttagatataaaatagaataaaataaagtgactaaaaattaaacaaataccctttaagaaattaaaaaaactaaggaaacatttttcttgtttcgagtagataatgccagcctgttaaacgccgtcgacgagtctaacggacaccaaccagcgaaccagcagcgtcgcgtcgggccaagcgaagcagacggcacggcatctctgtcgctgcctctggacccctctcgagagttccgctccaccgttggacttgctccgctgtcggcatccagaaattgcgtggcggagcggcagacgtgagccggcacggcaggcggcctcctcctcctctcacggcacggcagctacgggggattcctttcccaccgctccttcgctttcccttcctcgcccgccgtaataaatagacaccccctccacaccctctttccc

SEQ ID NO: 22 - DNA, 879 bp, Zea mays
aattcccatgatcttctctccttcatcaatggatgccatgtttcataacaataacaccaaatgtttgatgagctaccaacaattgcgcaaagactatggctaagctcgagctcgctcgctacaagttgttgactttcaaatacaagtttgtttttggaacaccaaatattctacatgatctttcactaagttgcgcaccactatcaaaagattatctaggccattattcaagtaaagagtgaacacgtctaagacccacaaccacaccaaatagaatacgcatacatgcaacatattgtgcaagaagtatccaactggactcccatgtattctaaaactattttcgtagagttaaagttatgacaaacttatcaaataaaaatttgaacgctggaccaaaactttcatctttcaaatccaccatcgtctatcctcataaattgttttgattataacacatctacgtaaatcatttgttttgaacaatactaatttaattttattaagtcaaataacctgcttagaaaataatccctccacctcatttaacaatttcttgtcaaacacacaccaagaaaaaaattaatgaaagagaaaagaaatgaaaaggacatggagttgaatactagcaaaattgattgaaggaagattcacaattgaaattgaaaccatttaatttattttcgggtccataataataaattggtaagaataaaaacccgatcaagtccggtacagtacaattccactccaccaactccttacttaaacccctatttatacccactctcatcctcactcttccttcacctctcacactctcttctctctctcaaaaccctcacacaaacgctgcgtttagtgtaagaaattcaatcc

SEQ ID NO: 23 - DNA, 318 bp, Solanum tuberosum
agacttgtccatcttctggattggccaacttaattaatgtatgaaataaaaggatgcacacatagtgacatgctaatcactataatgtgggcatcaaagttgtgtgttatgtgtaattactagttatctgaataaaagagaaagagatcatccatatttcttatcctaaatgaatgtcacgtgtctttataattctttgatgaaccagatgcatttcattaaccaaatccatatacatataaatattaatcatatataattaatatcaattgggttagcaaaacaaatctagtctaggtgtgttttgcgaattgcggc

SEQ ID NO: 24 - DNA, 431 bp, Zea mays
  misc_feature (336)..(336): n is a, c, g, or t
  misc_feature (350)..(350): n is a, c, g, or t
  misc_feature (362)..(362): n is a, c, g, or t
ggcggcttcggcgtagtgtaccgcggcgtgcacccgcggccgggcggcgtcgaggtggccgtcaagaaggtgtcccacgacttgcggcagggcctgcgggagttcgtctcggagatcgccagcatgagccggctgcgccaccgcaacctggtccagctcctaggctactgccggcggcggggcgagctgttgctcgtctatgactacatggtcaacggcagcctcgacaggcacctgttcggcgccggcaacgagccgactctgagctgggagcagcgcgccaagatcgtccgggacgtcgccgccgggctgctgtacctgcatgaggggtgggancagtggtggtgcancgcgacatcaangccagcaacgtcctcctcgacgccgacatgaaaggcaagctcagcgacttcgtctcgcgcggtctaaga

SEQ ID NO: 25 - protein, 132 aa, Zea Mays
  misc_feature (112)..(112): Xaa can be any naturally occurring amino acid
  misc_feature (115)..(115): Xaa can be any naturally occurring amino acid
GGFGVVYRGVHPRPGGVEVAVKKVSHDLRQGLREFVSEIASMSRLRHRNLVQLLGYCRRRGELLLVYDYMVNGSLDRHLFGAGNEPTLSWEQRAKIVRDVAAGLLYLHEGWXQIXASNVLLDADMKGKLSDF

SEQ ID NO: 26 - DNA, 2340 bp, Zea mays
aactccaccgcccctacctgacctgacctgagataagcaaacgcacacctgcggtgcgggctgcggctccgctcatcgctgccagccagtccaggtcactgcctccctcgttccacaccatgccagcggccactctcgccgtgcgggtggccgccatcctgctcctcctcgcccggggcggatccgggtcggcgcccggggagttcgtgctcagtggcttcgcgagcggcaacgtcacgaccagcggcgcggccgtcgtcacctcctccggcatcctgcagctcaccaacgcgaccaacgaggtgttcgggcacggcttctaccccgtgccgttccgcttcaaggacgcctcctccacgccgcgctccttctccaccaccttcgtgttcgccatggtgccgcggcacgacgacgcgcacggccacgggatcgccttcgcgctggcgccgtcgccgaccgtgcccggcgcggtggccgggaagaacctcggcctgttcaacacgtccgacgacacggggaaggccaggagcggggtcgtcgccgtcgagctcgacacggccaaggacgaggagtttagcgacatcaacgacaaccacgtcggtatcgacgtcaacagcctggtgtccgtgagctcagcgccggcggcgtacgtcgacgccggcagcctagtcaacatcagcctggtcagcggggagcccctacaggcgtgggtcgagtacgacggcgcgagcatgcgcctggaggtgacggtggcgccggcgcgcaagcccaggccggccgtcccgctcgtgtcttccgtcgtcaacctctcgtcggccgtatccgacgacacgtacgtcgggttcacggcggcgaacggcgcggcctccacctctcactacgttcttggctggagtttccgcctaggcgacggacgcgcgatggacctcgacgcctcgaagctgccgccggtcccatcgtccaagaagaagacgtcgcggctaaacttggtcacgctgtccctcgttgtcgtcgtggcactcctcttagcgtcggtggcagtcgcagctctcgtggtcaggcaccggcggttcgccgaggagcaagaggactgggagatacagtacgggcctcaccggatcagctacaaggacctgcacgcggccacgagggggttccgcgacgccatcggcgaaggcggcttcggccgcgtgtaccacggcgtgctacagcggccggtgaacgccgaggttgccgtcaagaaggtgtcccacgactcccggcaggggctacgcgagttcgtgtccgagatcgcgagcatgagccggctgcgccaccgcaacctggtgcagctcctcgggtactgccggcggcggggcgagctggtactcgtctacgactacatggtcaacggcagcctcgacaggcacctgttcgacgccggcaagccggcgctgagctgggagcagcgcggcaagatcgtccgcgacgtcgccgctgggctgctgtacctgcacgaggggtgggagcaggtggtggtgcaccgcgacatcaagtccgccaacgtgctcctcgacgccgacatgaacggtaagctcagcgacttcggcctcgcgcggctgtacgaccacggcagcaacccgcagacgacgcacgtcatcgggacgctggggtacctcgcgccggagatgagcaagacggggaaggccaccacaagcaccgacgtgttcgcgttcggcgccttcctgctcgaggtggcgtgcgggcggcggcccatggagcgcgacgacgaccttgatttgcccgggctcgtcgacctcgtcctcgagtgctggaaggccgggaggatcgtggaagccagggacaaaaggatcggcaagtgcgacgaggccgacgtcgagctggtgctcaaactcggcctgctctgttcgcaccctgacccccggtgccggccgagcatgaggcaggcggtgcagatgctggaaggcgcagcgccggtgccagagacaccgcccaaagatctagccagcaacagcaggttgttctacggatacagcgagtctttcgacgagttcgccaccatgttcccggcgacgtcggaggtcaccagcgtcaccacgcagccgtcttcctcacactccaccggcgaggggcagcaggtctcctccgaacaaatcaccaacgtatagtcatgtgttttacgatggttgggttaggaagcaaacagtgatcataggtttaggtgttgtgtggtattttcttcaagtgaatataggatatggtcagccattttgtagggatgaccacaaaaacaaagttagataaagctccaacagattgaactgaaaaaaaaaaaaaaaa

SEQ ID NO: 27 - protein, 682 aa, Zea mays
MPAATLAVRVAAILLLLARGGSGSAPGEFVLSGFASGNVTTSGAAVVTSSGILQLTNATNEVFGHGFYPVPFRFKDASSTPRSFSTTFVFAMVPRHDDAHGHGIAFALAPSPTVPGAVAGKNLGLFNTSDDTGKARSGVVAVELDTAKDEEFSDINDNHVGIDVNSLVSVSSAPAAYVDAGSLVNISLVSGEPLQAWVEYDGASMRLEVTVAPARKPRPAVPLVSSVVNLSSAVSDDTYVGFTAANGAASTSHYVLGWSFRLGDGRAMDLDASKLPPVPSSKKKTSRLNLVTLSLVVVVALLLASVAVAALVVRHRRFAEEQEDWEIQYGPHRISYKDLHAATRGFRDAIGEGGFGRVYHGVLQRPVNAEVAVKKVSHDSRQGLREFVSEIASMSRLRHRNLVQLLGYCRRRGELVLVYDYMVNGSLDRHLFDAGKPALSWEQRGKIVRDVAAGLLYLHEGWEQVVVHRDIKSANVLLDADMNGKLSDFGLARLYDHGSNPQTTHVIGTLGYLAPEMSKTGKATTSTDVFAFGAFLLEVACGRRPMERDDDLDLPGLVDLVLECWKAGRIVEARDKRIGKCDEADVELVLKLGLLCSHPDPRCRPSMRQAVQMLEGAAPVPETPPKDLASNSRLFYGYSESFDEFATMFPATSEVTSVTTQPSSSHSTGEGQQVSSEQITNV

SEQ ID NO: 28 - DNA, 2222 bp, Zea mays
tctccatccccattaattcctcccctcactccatcactcccatgtcaagctccaggaaacccaagactcccatcctcctcttcttcctcttccttctcgccagcctcgccttctcccaagagttcacctacaagggcttcagcgccagtggccgcggcgggagcccgaacctgaacctgaacggcacgtcggcaaccgagatcttgcccagcggcatcctccgcctcaccaacgagacgtcccggctcttcggacacgccttctacccgaccccgctgcgcttcctggaccagaagaacggcaccgccgtgtccttctccacgcagttcgcctttaccgtggtgcccgagttcccgacgctcggcggccacggcttcgcgttcgtcgtcgcgcccgacccgcgcatgtccggtgcgctgcccagccagtacctgggcctactcagcgccgccgacgtcggcaacgccaccaaccacctcttcgccatcgagttcgacaccgtgcaggacttcgagttcgacgacgtcaacggcaaccacgtcggcgtcgacctcaacagcctcatctccaacgcgtccgccaaggccgaccctttgaacctcaagtccggggacaccaccgcctgggtcgactacgacggcgccgccaggttgcttaacgtctccatcgccaacggcacgttggggaagcccaccacgccgctcatctccttccgcgtcgacctctctgggatcttccgcgagcagatgtacgtcggcttctcggcgtccacgggagtcctcgcgagctcgcactacctcaggggttggagctttcgcctcggcgccggcgccgcgccggcgctggatctctcgtccctgccgtcgctgccccagctcaagagctccaagaaccggacctcgctcatcctcgccgtcgcgttctcggcgttcgtggcgctcgtcgtgctcgccggcgccggcgcgtacggtgcgtaccggtacaagaaccgcgacatcatcgagccgtgggagctggactacggcccgcatcggttcaagtacgccgaactccgccgcgcgacgcgcgggttccgcgagcgcgaggtgctcggatccggcggtttcggcaaggtgtaccgcggcgtgctccggaaatccggcgagaccgtggccgtgaagcgcgtgaaccacgagtcccggcagggcctccgcgagttcgtggcggagatcgcgtctatcggccggctccgccaccgcaacctggtccagctccagggctggtgccgccgccgcggcgaccttctcctcgtctacgactacatgcccaacggcagcctggaccgccacctcttcggcgaccacctcaaagcgtcgcgcctgacctggccggtccgctaccgcatcctccgcgacgtcgcgtcggcgctgctgtacctgcacgagggatgggagagcgtcgtcctccaccgcgacgtcaaggccagcaacgtgctcctcgacgccgacatgtcggcgcggctcggcgacttcggtctcgccaagctccacgagcgcgggaccaacccgagcacgacgcgcgtggtgggcaccctggggtacctggctcccgagctgacgcggacggggaaggccacgacggctgccgacgtgttcgcgttcggtgccctggtgctggaggtggtggccgggcggcatcccatagagccccgcgcgccgcccgaggagctggtgctggccgagtgggcgtgggagcggtacgcggcgggggaggtggagaaggtggtggacgcccggctcgccggcgcgtacgacttcgcggaggccgccgcggccgtgaaggtggggctgtggtgctcgcacccggcgccggcgacgcggcccaccatgcgggaggtggcgaggtaccttgacggcggggatgccagcgaggtgccggagcctcctcccccgcctcccatgccgccggcatactctggcgaggtcgggttcgacgatttcgtgcactcgtacccgtcgtcgtcgttcgagcgcgccgccgcagctggcggcggctgggacggcgggacccagatgtcggtcgccacgttccccttctcgtctctgtccatgcggtcatctcacgtcagcacgtgatgcatcgaaattcctgggcccgcttgccagtaagatgacgacttcgtcaaacataatagtgtgaccttggagctgaaaaaaaaaaaaaaaaaaaaaaaaaaaaaaaaa

SEQ ID NO: 29 - protein, 690 aa, Zea mays
MSSSRKPKTPILLFFLFLLASLAFSQEFTYKGFSASGRGGSPNLNLNGTSATEILPSGILRLTNETSRLFGHAFYPTPLRFLDQKNGTAVSFSTQFAFTVVPEFPTLGGHGFAFVVAPDPRMSGALPSQYLGLLSAADVGNATNHLFAIEFDTVQDFEFDDVNGNHVGVDLNSLISNASAKADPLNLKSGDTTAWVDYDGAARLLNVSIANGTLGKPTTPLISFRVDLSGIFREQMYVGFSASTGVLASSHYLRGWSFRLGAGAAPALDLSSLPSLPQLKSSKNRTSLILAVAFSAFVALVVLAGAGAYGAYRYKNRDIIEPWELDYGPHRFKYAELRRATRGFREREVLGSGGFGKVYRGVLRKSGETVAVKRVNHESRQGLREFVAEIASIGRLRHRNLVQLQGWCRRRGDLLLVYDYMPNGSLDRHLFGDHLKASRLTWPVRYRILRDVASALLYLHEGWESVVLHRDVKASNVLLDADMSARLGDFGLAKLHERGTNPSTTRVVGTLGYLAPELTRTGKATTAADVFAFGALVLEVVAGRHPIEPRAPPEELVLAEWAWERYAAGEVEKVVDARLAGAYDFAEAAAAVKVGLWCSHPAPATRPTMREVARYLDGGDASEVPEPPPPPPMPPAYSGEVGFDDFVHSYPSSSFERAAAAGGGWDGGTQMSVATFPFSSLSMRSSHVST

SEQ ID NO: 30 - DNA, 802 bp, Glycine max
  misc_feature (1)..(13): n is a, c, g, or t
  misc_feature (15)..(18): n is a, c, g, or t
  misc_feature (23)..(28): n is a, c, g, or t
  misc_feature (31)..(34): n is a, c, g, or t
  misc_feature (107)..(111): n is a, c, g, or t
  misc_feature (127)..(130): n is a, c, g, or t
  misc_feature (182)..(182): n is a, c, g, or t
  misc_feature (184)..(185): n is a, c, g, or t
  misc_feature (661)..(662): n is a, c, g, or t
  misc_feature (679)..(680): n is a, c, g, or t
  misc_feature (732)..(732): n is a, c, g, or t
  misc_feature (734)..(738): n is a, c, g, or t
  misc_feature (742)..(744): n is a, c, g, or t
  misc_feature (746)..(746): n is a, c, g, or t
  misc_feature (753)..(758): n is a, c, g, or t
  misc_feature (770)..(771): n is a, c, g, or t
  misc_feature (781)..(781): n is a, c, g, or t
  misc_feature (783)..(789): n is a, c, g, or t
  misc_feature (793)..(793): n is a, c, g, or t
  misc_feature (797)..(797): n is a, c, g, or t
  misc_feature (800)..(802): n is a, c, g, or t
nnnnnnnnnnnnngnnnnttagnnnnnncannnnggggttcagggagaaggagctgttggggagtggtcgatttggtagagtctacaaaggggtgatgcccatttcnnnnntgaggtggccgtgaannnngtgtcccgtgaatcaaggcaagggatgagggaatttgtggcagaaatcgttntnnttggttgtctcaggcaccggaatttggttccccttctggggtactgcaggcgcaaaggagagttgctattggtctatgactacatgccaaatggaagccttgacaagtatctctacaacaaaccaagagtgaccttaaattggagccagaggtttaaaatcacaaaaggggttgcttcaggtctgttttatctacatgaggaatgggagcaagttgtggtccacagagacattaaggctagcaatgtgctacttgatgctgaattgaatggtagattaggggactttggtctttcaaggttgtatgaacatggaactgatcctcacactactcatgtggttggaactcttggttatcttgcacctgagcacactagaacgggtaaggcaactacaagctctgatgtgtttgcttttggtgcatttatgctagaggttgtgtgtggaaggaggccaatagagaaaggaggggaatcnnggagcgaaattctggtnnattgggtgtataattgttggaaaaagggtgagattcttgagtcaatggatcncnnnnngggnnnanattatannnnnnatgaggtggaannggtgttgaancnnnnnnngttntgcntcnnn

SEQ ID NO: 31 - protein, 193 aa, Glycine max
  misc_feature (11)..(12): Xaa can be any naturally occurring amino acid
  misc_feature (171)..(171): Xaa can be any naturally occurring amino acid
  misc_feature (177)..(177): Xaa can be any naturally occurring amino acid
GMREFVAEIVXXGCLRHRNLVPLLGYCRRKGELLLVYDYMPNGSLDKYLYNKPRVTLNWSQRFKITKGVASGLFYLHEEWEQVVVHRDIKASNVLLDAELNGRLGDFGLSRLYEHGTDPHTTHVVGTLGYLAPEHTRTGKATTSSDVFAFGAFMLEVVCGRRPIEKGGESXSEILVXWVYNCWKKGEILESMD

SEQ ID NO: 32 - DNA, 525 bp, Arabidopsis thaliana
  misc_feature (2)..(5): n is a, c, g, or t
  misc_feature (12)..(15): n is a, c, g, or t
  misc_feature (17)..(17): n is a, c, g, or t
  misc_feature (468)..(468): n is a, c, g, or t
gnnnnggggggnnnnanaaagctgggagctccaccgcgggtggcgggccgctctagaactagtggatcccccgggctgcaggaattcggcacgagccgaccaaaaccggagtaacaatcccaattcccggtgaatctggtgagaaatccggcaacgaaacctgtctgtcaaggtactgcacaacttttaccatgtcaggtctcgattccggcacaagattcgtgcaaagcaaccctaatttcaataccatctcgatttgaggtctcaattctccactcagtttgggatctcgagcactgattaaatctttccttttccaagcaatcacaaacccatttcaccaagaagctgtttctcaatcggcagattaggttctacaggtcttctcccacaagttacttcaaggatcaatgcaccaaatgcgtatacatcggttttagttgaaagctcccattgatgttagctcangtggcatgtatcctactgttccaacaagctcctgttgttgttggatttgctccaagg

SEQ ID NO: 33 - protein, 74 aa, Glycine max
WKRKDLISARDPKLSGELRPQIEMVLKLGLLCTNLVPESRPDMVKVVQYLDRQVSLPDFSPDSPGIGIVTPVLV

SEQ ID NO: 34 - DNA, 2076 bp, Zea mays
atggcggcggctgttactgttgccgtgcgcgtgatggtgcccgtcctgctgctcgctccagcgccggccgcagccgccgtcgagttcacgttcaccggcttcgcgcgcgagaacgtgacgaccagcggcgcggccgccacctcctccggcggcctcctgcagctcaccaacgcgaccaactgggtgttgggccacggcttctacccggcaccgctgcgcttcaaggacgccgcctcgggcgcgccgctctccttctccaccaccttcgtcgccgccatcctgccgcggtacctggacgcgcacggccacgggctcgccttcgcgctcgcgccgtccgcggccggcccggggctggccgtcgcggggaagtacctcggcctgttcaacacgtcggacaacgcgggcaacgggaccacgagcgaggtcgtcgccgtcgagctcgacacggcgctggacgtggagttcgacgacatcaacaacaaccacgtcggcgtcgacgtccacaccctcaggtctgttgcgtccaagcccgcggggtacgtcgacgctgccaccggcgggtccgtcgacgtcgccctggccagcgggaggctcctgcaggtgtggatcgagtacgacggcgcgaccacgcggctcgaagtgaccgtgtcgccggccggtgtcggcgtgcccaggccgcgcgtcccgctcgtgtcttgcgaggtcgacctctcgtcggcggtggccgaccagacgtacgtcgggttctcggccgcgaacggcgccgcctcgagctcgcactacgtcctaggctggagcttccgactcggcggcggccgcgcgccggacctcgacctgtccaagctgccgcggcccccgccgccgtctggggggcacaagaaggcgacggagctgccgctgctcctaacgctcatcatcctcgtcgtcgtggtgctcctcgtggtgtcagctgccgtcacagtactcgtggtctggcgccgtcggaggttcaccgaggagcaggaggactgggaggtcgagtacggccctcaccgggtcagctacaaggacctgtacgccgcgaccaggggtttccgcgacgtcatcggtgtcggcggcttcggcgtagtgtaccgcggcgtgcacccgcggccgggcggcgtcgaggtggccgtcaagaaggtgtcccacgactcgcggcagggcctgcgggagttcgtctcggagatcgccagcatgagccggctgcgccaccgcaacctggtccagctcctaggctactgccggcggcggggcgagctgttgctcgtctatgactacatggtcaacggcagcctcgacaggcacctgttcggcgccggcaacgagccgactctgagctgggagcagcgcgccaagatcgtccgggacgtcgccgccgggctgctgtacctgcatgaggggtgggagcaggtggtggtgcaccgcgacatcaaggccagcaacgtcctcctcgacgccgacatgaacggcaggctcagcgacttcggtctcgcgcggctctacgaccacggcagcgagtcgcggacgacgcgcgtcatcgggacgctggggtacctcgcgccggagatgatcaagacgggcaaggccacgcccagcgccgacgtgttcgccttcggcgccttcctgctcgaggtggcctgcggccggaggcccatggagtcactcggcaacaatggcgaccccgcggggcttgtcgacagcgtccttgagcgctggaagaccgggaggatcaaagacgccagggaccctaggatcggcatgtgcgacgaggacgatctcgagctggtcctcaagctcggtttgctgtgctcgcacccggaccctcgctgccgcccaagcatgaggcaggtggtgcagatactggaaggcgctgcgtcgttgccgtcgacgccgccggaagatctaggcggcgctggcggcaggatatttggacactacgagacgttcgatgaattcgtcaacgtgttcccgacgacgttcgatatcaccaccgtcacgacgccgtcaccttgttcgccttccagcgccgaccgccagcagctaatctccgcctga

SEQ ID NO: 35 - protein, 691 aa, Zea mays
MAAAVTVAVRVMVPVLLLAPAPAAAAVEFTFTGFARENVTTSGAAATSSGGLLQLTNATNWVLGHGFYPAPLRFKDAASGAPLSFSTTFVAAILPRYLDAHGHGLAFALAPSAAGPGLAVAGKYLGLFNTSDNAGNGTTSEVVAVELDTALDVEFDDINNNHVGVDVHTLRSVASKPAGYVDAATGGSVDVALASGRLLQVWIEYDGATTRLEVTVSPAGVGVPRPRVPLVSCEVDLSSAVADQTYVGFSAANGAASSSHYVLGWSFRLGGGRAPDLDLSKLPRPPPPSGGHKKATELPLLLTLIILVVVVLLVVSAAVTVLVVWRRRRFTEEQEDWEVEYGPHRVSYKDLYAATRGFRDVIGVGGFGVVYRGVHPRPGGVEVAVKKVSHDSRQGLREFVSEIASMSRLRHRNLVQLLGYCRRRGELLLVYDYMVNGSLDRHLFGAGNEPTLSWEQRAKIVRDVAAGLLYLHEGWEQVVVHRDIKASNVLLDADMNGRLSDFGLARLYDHGSESRTTRVIGTLGYLAPEMIKTGKATPSADVFAFGAFLLEVACGRRPMESLGNNGDPAGLVDSVLERWKTGRIKDARDPRIGMCDEDDLELVLKLGLLCSHPDPRCRPSMRQVVQILEGAASLPSTPPEDLGGAGGRIFGHYETFDEFVNVFPTTFDITTVTTPSPCSPSSADRQQLISA

SEQ ID NO: 36 - DNA, 2145 bp, Glycine max
atgtctctcaaggttgtaacagtggtgtttttgctggcaacaatagtagtagccagtgatgacaccagtttcacctataatggattccaatcttcttatttgtaccttgatggaagtgctgagttcaccaccaatggcatgcttaagctcaccaatcacaccaagcaacaaaagggtcatgctttcttcccaagtccaatagtcttcaagaacaccacaagtggaagtgtgttttctttctccaccacttttgtgtttgccataaggtctgagtttcccaatttgagtggtcatgggattgtgttcgtggtttctccaacaaaaggggttccacattctcttccaagccagtaccttggcctctttgatgacaccaacaacggcaacaatagcaaccatatttttggggtggagcttgatacaattctgaacaccgagtttggtgatatcaatgacaaccatgttggagttgatgttaatgaattgaagtcggttaaatcagctgctgcagggtattacagtgatgaggggtttaagaatttgagtctcatcagtggctacccaatgcaggtgtgggtggaatatgatggcctaaagaagcagattgatgttactttagctccaatcaatgtcggtaaaccggaaggccctttattatcattgagcaaagacctttctccaattctgaacagtagcatgtatgttggattctcatcctcaactgggtcaattctaagttctcattatgttttgggttggagctttaaggtgaatggcaaggctcaacagcttgcaatctctgaactccctatgctacctagactaggtggtaaagaagagtcaaaggttcttattgtagggttgcctctgatattactcagtttgattctcatggtggctctagcagtggttcatgtcatcaagaggaagaagttcacggagctgcttgaagattgggagcaagactatggtcctcataggttcaagtacaaagatcttagcctggcaacaaaggggttcagggagaaggagctgttggggagtggtggatttggtagagtctacaaaggggtgatgccaatttccaaaattgaggtggcagtgaagaaggtgtcccgtgaatcaaggcaagggatgagggaatttgtggcagaaatcgttagcattggctgtctcaggcaccggaatttggttccccttctggggtactgcaggcgcaaaggagagttgctattggtctatgactacatgccaaatggaagccttgacaagtatctctacaacaaaccaagagtgaccttaaattggagccagaggtttaaaatcacaaaaggggttgcttcaggtctgttttatctacatgaggaatgggagcaagttgtggtccacagagacattaaggctagcaatgtgctacttgatgctgaattgaatggtagattaggggactttggtctttcaaggttgtatgaacatggaactgatcctcacactactcatgtggttggaactcttggttatcttgcacctgagcacactagaacgggtaaggcaactacaagctctgatgtgtttgcttttggtgcatttatgctagaggttgtgtgtggaaggaggccaatagagaaaggaggggaatccgggagcgaaattctggtcgattgggtgtataattgttggaaaaagggtgagattcttgagtcaatggatccaaacttgggcgcaaattataggccagatgaggtggaattggtgttgaaactcgccttgttgtgctcacattctgagcctttggctaggccaagcatgcgccaggttgtgcaatacttggagaaagatgtgcctctgcctgatttgtgtatgcttagcttatcttcaaatggcttaacttttggtttgcatgaagattttcaggactgtccaatgtcttatccttcatctatgaataggccaatatctcatacttcttcaattgttgaatcacttctctctgggggtcgttgatttttagaagacacatgaaatgtgcatgcatgcatgagcagtttcattgtgtttggtttcatcttattcttaattggtctatttgttatttgtttatgtattatattctaaaatgaaatagattatcgaaaatattaaaga

SEQ ID NO: 37 - protein, 667 aa, Glycine max
MSLKVVTVVFLLATIVVASDDTSFTYNGFQSSYLYLDGSAEFTTNGMLKLTNHTKQQKGHAFFPSPIVFKNTTSGSVFSFSTTFVFAIRSEFPNLSGHGIVFVVSPTKGVPHSLPSQYLGLFDDTNNGNNSNHIFGVELDTILNTEFGDINDNHVGVDVNELKSVKSAAAGYYSDEGFKNLSLISGYPMQVWVEYDGLKKQIDVTLAPINVGKPEGPLLSLSKDLSPILNSSMYVGFSSSTGSILSSHYVLGWSFKVNGKAQQLAISELPMLPRLGGKEESKVLIVGLPLILLSLILMVALAVVHVIKRKKFTELLEDWEQDYGPHRFKYKDLSLATKGFREKELLGSGGFGRVYKGVMPISKIEVAVKKVSRESRQGMREFVAEIVSIGCLRHRNLVPLLGYCRRKGELLLVYDYMPNGSLDKYLYNKPRVTLNWSQRFKITKGVASGLFYLHEEWEQVVVHRDIKASNVLLDAELNGRLGDFGLSRLYEHGTDPHTTHVVGTLGYLAPEHTRTGKATTSSDVFAFGAFMLEVVCGRRPIEKGGESGSEILVDWVYNCWKKGEILESMDPNLGANYRPDEVELVLKLALLCSHSEPLARPSMRQVVQYLEKDVPLPDLCMLSLSSNGLTFGLHEDFQDCPMSYPSSMNRPISHTSSIVESLLSGGR

SEQ ID NO: 38 - DNA, 1974 bp, Arabidopsis thaliana
atggctccaggattggatctgatctggatggtaatctcctttcttcttctgattcatctgtcaagtcaacaagaaactggcttcagcttcaacggttttcgccagggagatcttcatgttgatggggttgctcaaatccttcccggtggacttctgcggctgactgacacttcagagcagaaaaagggtcatgctttcttcaggcagcccttagtgttcaattcatctgaacctctctcgttctcaacgcatttcgtgtgtgctatggtgcgtaaaccgggagttaccggtggaaatgggattgctttctttctatctccttccatggatcttacaaacgcagatgcaactcagtatttgggtcttttcaacaccacaaccaacaggtctccctcatctcatatctttgctattgagcttgatactgttcaaagtgcagaatttgatgacatcgataacaatcatgttggtatcgacgtgaacagcctaacctctgttgaatctgctccggcttcttacttttcagacaaaaaaggtctcaataagagcataagtctcttgagtggagattcaatccaggtctgggtggactttgatggaactgtactaaacgtttcattggcgcctctagggattcggaagccaagtcaaagtcttatatcaagatccatgaatctttcagaagttatccaggatagaatgtttgtcggattctctgcagcaacaggacaattggctaataaccattacatactcggttggagtttcagcagaagcaaggcatcgttacagagcctagacatctcaaaacttccccaagttcctcatcctaaaatgaaaacttctctcctgctgattcttctgttgattgtacttggaatcatactcttggtactcctggtaggagcttatctatacagaagaaacaagtatgcagaagtaagagaggaatgggaaaaagagtatggtccacaccgatactcttacaaatccctgtacaaagcaacaaaaggattccacaaagatggttttcttggtaaaggaggattcggagaagtctacaaaggaactctacctcaggaagacatagctgtgaaaagattttcccatcatggagaacgagggatgaagcaattcgtagctgaaattgcaagcatgggttgcttagaccacaggaacttggttccacttttcggatactgcaggcgaaaaggcgagtttcttctcgtctccaagtacatgcctaatggaagtcttgaccagttcttgtttcataacagagaaccatctcttacttggtccaaaaggctagggattctaaagggtatagcttcagctcttaaatacttacacacagaagctacacaagttgttctacacagagatatcaaagcttctaatgtaatgttagacacagacttcacaggaaagttaggagattttggtatggctaggtttcatgaccatggagcaaatccaacaacaacaggagctgttggaacagtaggatacatgggacctgagctaacatcaatgggagcttcaactaaaaccgatgtatacgcatttggtgcattgatccttgaagtaacttgtgggagaagacctgtagaacctaatctgccgattgagaaacagcttctggtgaaatgggtttgtgattgctggaaaaggaaagatttaatcagtgctcgagatcccaaactgagtggagaattgatacctcaaatcgagatggtattgaaattagggttgctttgcacgaatcttgtgccggaatcgagacctgacatggtaaaagttgtgcagtaccttgacagacaggtttcgttgccggatttctcaccagattcaccgggaattgggattgttactccggttttggtcggaggaagctccaccgtgatctctaacatttcttctccggtgactgagtttattactcactcgattcaatacggaattggacgatga

SEQ ID NO: 39 - protein, 657 aa, Arabidopsis thaliana
MAPGLDLIWMVISFLLLIHLSSQQETGFSFNGFRQGDLHVDGVAQILPGGLLRLTDTSEQKKGHAFFRQPLVFNSSEPLSFSTHFVCAMVRKPGVTGGNGIAFFLSPSMDLTNADATQYLGLFNTTTNRSPSSHIFAIELDTVQSAEFDDIDNNHVGIDVNSLTSVESAPASYFSDKKGLNKSISLLSGDSIQVWVDFDGTVLNVSLAPLGIRKPSQSLISRSMNLSEVIQDRMFVGFSAATGQLANNHYILGWSFSRSKASLQSLDISKLPQVPHPKMKTSLLLILLLIVLGIILLVLLVGAYLYRRNKYAEVREEWEKEYGPHRYSYKSLYKATKGFHKDGFLGKGGFGEVYKGTLPQEDIAVKRFSHHGERGMKQFVAEIASMGCLDHRNLVPLFGYCRRKGEFLLVSKYMPNGSLDQFLFHNREPSLTWSKRLGILKGIASALKYLHTEATQVVLHRDIKASNVMLDTDFTGKLGDFGMARFHDHGANPTTTGAVGTVGYMGPELTSMGASTKTDVYAFGALILEVTCGRRPVEPNLPIEKQLLVKWVCDCWKRKDLISARDPKLSGELIPQIEMVLKLGLLCTNLVPESRPDMVKVVQYLDRQVSLPDFSPDSPGIGIVTPVLVGGSSTVISNISSPVTEFITHSIQYGIGR

SEQ ID NO: 40 - DNA, 2020 bp, Zea mays
atggctaacctcttgcaaacacctttccttgtacccttcctactttccatggccctaataaaccttgtgtgcttcacggccactgtcagcagtgaggacgatcagttcgtctactcgtgcttctccggcaaaaacctcaccctcgacggagcagccgccgttacagcagacggcgtccttgagctgaccaatcgcacggtgcacgtcaaaggccatgccttctacccagctccatggcgattccgcaggtcccctggtgagacggtgcagtctttctcggtcacctttgtgttcggcatggtccccatctactccgacaaatgcaccgacggcatggctttcctgatctccccgaccaaggatttctccggtgcgcaggagtcgcagtacctgggcctcctcaacaaaacaagcgacggcaaagcaagcaaccacatatttgcagtcgagcttgatagcagcgagaactccgagttccatgacatcgacgacaaccacgtcggcatcaacatcaacagcctcacctcatttaggtccctttcagctggcttctacgacgacgacgacaagaacggtctcttccaaaacttgtcccttgttagccgcaaagagatgcaagtttgggtggactataatggagataccacgcagatcaacgtgacactggctcccctcaaggtcaatgtagccaaaccgtccaaaccgctactcacagctacctacaacctctcaacagtattggcggaagacccatcttacgttggcttctctgcatcaactggtccaatcaactcgctgtactgtgtgctcggctggagcttaggcatcaatgccccagctccacctattgatgtcgccaagctgccaaagctacctcgtgctggcccaaagcctcggtccaagctgcttgagatcatcctaccaatagtcacagccactttcatcatccttatcggaacaagcatatttctgtttgtgcggaggaggatgaagtatgctgaggtacaagaagactgggaagctgagttcgggccacaccgcttcccctacaaggacttgttccatgctacggatggattcaagaacaagaacctacttggcttaggaggattcgggaaggtgtacaaaggcgtgctccctgtctcaaagctagaggtcgctgtgaagagggtgtcacatgaatcaaggcagggaatgaaggagtttattgcagagattgtcagtattggccgtctccgccatcgcaacctggtccagctacttggttactgtagaagaaagggtgagctactgttggtatatgactacatgtcaaatggaagtcttgacaagtatttacattgcgaaggggataagcccactctaaactgggaccaaaggtttcagatcatcaagggcgttgcttctggcctgttctacctgcatgagaggtgggagaaagttgtgatccaccgtgacatcaaagccagcaatgtgttactggacagtgagatgaatggacgcctaggtgattttggtctggcaaggctgtatgatcacggtactaacccacagacaactcatgtggttggtaccatgggatatatagccccagaactggcccggaccggtaaggcaacacctctgacagatgtgtatgcgtttggtatcttcattcttgaggtaacctgtgggcaaaggccaatcagtagccatgcagaggacagttctcaggtcctaattgattgggttgtcaaccattggcacaaaggatcagtcacatacacagtggacagtaggttgcaatgcagctacaatgcagatgaggtgcgcctagcgttgaaccttggactcatgtgtgcgcacccaatttgtaatgcaaggcccagtatgagacaggtcgtacaatacctcaacggcgaaatgccactcccagaaatgatgcccacagacttaagctatagtgttctggccttcatgcaaaatgaaggctttgaccagtatacatccaagggcgaattcgtttaaacctgcaggacta

SEQ ID NO: 41 - protein, 668 aa, Zea mays
MANLLQTPFLVPFLLSMALINLVCFTATVSSEDDQFVYSCFSGKNLTLDGAAAVTADGVLELTNRTVHVKGHAFYPAPWRFRRSPGETVQSFSVTFVFGMVPIYSDKCTDGMAFLISPTKDFSGAQESQYLGLLNKTSDGKASNHIFAVELDSSENSEFHDIDDNHVGININSLTSFRSLSAGFYDDDDKNGLFQNLSLVSRKEMQVWVDYNGDTTQINVTLAPLKVNVAKPSKPLLTATYNLSTVLAEDPSYVGFSASTGPINSLYCVLGWSLGINAPAPPIDVAKLPKLPRAGPKPRSKLLEIILPIVTATFIILIGTSIFLFVRRRMKYAEVQEDWEAEFGPHRFPYKDLFHATDGFKNKNLLGLGGFGKVYKGVLPVSKLEVAVKRVSHESRQGMKEFIAEIVSIGRLRHRNLVQLLGYCRRKGELLLVYDYMSNGSLDKYLHCEGDKPTLNWDQRFQIIKGVASGLFYLHERWEKVVIHRDIKASNVLLDSEMNGRLGDFGLARLYDHGTNPQTTHVVGTMGYIAPELARTGKATPLTDVYAFGIFILEVTCGQRPISSHAEDSSQVLIDWVVNHWHKGSVTYTVDSRLQCSYNADEVRLALNLGLMCAHPICNARPSMRQVVQYLNGEMPLPEMMPTDLSYSVLAFMQNEGFDQYTSKGEFV

SEQ ID NO: 42 - DNA, 2006 bp, Arabidopsis thaliana
atgattcgaggattgcttttgggaatcatctggatgatattttgtgtttgttcatcatttcagcaagagacgccgtttgtttacaacaactttggtcacgtagatcatcttcaccttgacggtagtgcaagaatcattcccagtggtggtatcctgcaactgacaaatgcaaccaatagccaaataggtcatgttttctacgagaagccgattgagttcaaatcatctgaatcagtctcgttctcgacatattttgtgtgtgcactgctccctgctggtgatccgagtggccatggcatgaccttttttgtgtctcattccactgatttcaaaggcgcagaagcaactcgatacttcgggattttcaacagaaatggttctacttccacacgtgtgttggctgtagagcttgacacttctctagcttcagatgtgaaagacatcagcgataatcatgttgggattgatgtgaacagcgcagagtctattacatctgccaatgcttcttatttttcagacaaagaagggaagaagattgacataaaactcttgagtggtgatcctatccaggtttgggtggactatgaaggaacaacgctcaacgtttcattggctcctcttagaaacaagaaaccaagccgacctcttttgtcatcaacatccatcaatctaactgatattttgcaaggtagaagaatgtttgttgggttttctggctcaaccggatcaagcatgagttaccagtacatactcgggtggagtttcagcaaaagcatggcgtctctgccgaacattgacatctcaaaacttcccaaagttcctcactctagcactaaaaagaagtctacatctcctgtgctcagtgttctgcttggtttaatagctttcatagttttggggattcttgttgtagcttatttgtataggagaaacttgtactctgaagtaagagaggaatgggaaaaagagtatggtccaattaggtattcctacaaatctctatacaaagcaaccaaaggattcaataggagtgaatttcttgggagaggaggttttggtgaagtctacaaaggaactctccctcggagcagagaactgagagaagtagcagtgaagcgagtatcacatgatggtgagcacggtatgaagcaatttgttgctgagatcgtgagcatgaggagtttaaaacaccggagcttggttccacttcttgggtattgcaggagaaaacatgagttattactggtgtctgagtacatgccaaatggtagtcttgaccattacttgtttaatcatgatagattgtctcttccctggtggagaagacttgcgatccttagggacatcgcatcagctcttagttacttacatacagaagctgaccaagttgttatacacagagacatcaaagctgcaaatgttatgttggatgcagagttcaatggaaggttgggagattttggtatgtccaggttatatgacagaggggctgatccaagcacaacagctgcagtgggaactgttggttacatggcacctgagcttacaacaatgggagcttctactggaactgatgtgtacgcgtttggtgttttcttgcttgaagtaacttgtgggaggagacctgtggaacccggcttacctgaagcaaaacgttttctgatcaaatgggttagtgaatgctggaaaaggtcttctttgattgatgctagagatccaaggttgacagaattctcatcccaggaagtcgagaaggttctgaaactcggtttgctatgtgcaaaccttgctccagattcaagaccggccatggaacaagtggtgcaatacttaaatggaaacctagctttacccgagttttggcccaattctccagggattggagttctgtctccaatggcgctttccccagcaccactcgtgatcccttcactatcattttcgtcttcctcctccaacaactctatgtttattactcactcagtcctctacgggagtgggcgatg

SEQ ID NO: 43 - protein, 668 aa, Arabidopsis thaliana
MIRGLLLGIIWMIFCVCSSFQQETPFVYNNFGHVDHLHLDGSARIIPSGGILQLTNATNSQIGHVFYEKPIEFKSSESVSFSTYFVCALLPAGDPSGHGMTFFVSHSTDFKGAEATRYFGIFNRNGSTSTRVLAVELDTSLASDVKDISDNHVGIDVNSAESITSANASYFSDKEGKKIDIKLLSGDPIQVWVDYEGTTLNVSLAPLRNKKPSRPLLSSTSINLTDILQGRRMFVGFSGSTGSSMSYQYILGWSFSKSMASLPNIDISKLPKVPHSSTKKKSTSPVLSVLLGLIAFIVLGILVVAYLYRRNLYSEVREEWEKEYGPIRYSYKSLYKATKGFNRSEFLGRGGFGEVYKGTLPRSRELREVAVKRVSHDGEHGMKQFVAEIVSMRSLKHRSLVPLLGYCRRKHELLLVSEYMPNGSLDHYLFNHDRLSLPWWRRLAILRDIASALSYLHTEADQVVIHRDIKAANVMLDAEFNGRLGDFGMSRLYDRGADPSTTAAVGTVGYMAPELTTMGASTGTDVYAFGVFLLEVTCGRRPVEPGLPEAKRFLIKWVSECWKRSSLIDARDPRLTEFSSQEVEKVLKLGLLCANLAPDSRPAMEQVVQYLNGNLALPEFWPNSPGIGVLSPMALSPAPLVIPSLSFSSSSSNNSMFITHSVLYGSGR

SEQ ID NO: 44 - DNA, 2299 bp, Arabidopsis thaliana
atttgtttcattaccaatgattcgaggattgcttttgggaatcatctggatgatattttgtgtttgttcatcatttcagcaagagacgccgtttgtttacaacaactttggtcacgtagatcatcttcaccttgacggtagtgcaagaatcattcccagtggtggtatcctgcaactgacaaatgcaaccaatagccaaataggtcatgttttctacgagaagccgattgagttcaaatcatctgaatcagtctcgttctcgacatattttgtgtgtgcactgctccctgctggtgatccgagtggccatggcatgaccttttttgtgtctcattccactgatttcaaaggcgcagaagcaactcgatacttcgggattttcaacagaaatggttctacttccacacgtgtgttggctgtagagcttgacacttctctagcttcagatgtgaaagacatcagcgataatcatgttgggattgatgtgaacagcgcagagtctattacatctgccaatgcttcttatttttcagacaaagaagggaagaagattgacataaaactcttgagtggtgatcctatccaggtttgggtggactatgaaggaacaacgctcaacgtttcattggctcctcttagaaacaagaaaccaagccgacctcttttgtcatcaacatccatcaatctaactgatattttgcaaggtagaagaatgtttgttgggttttctggctcaaccggatcaagcatgagttaccagtacatactcgggtggagtttcagcaaaagcatggcgtctctgccgaacattgacatctcaaaacttcccaaagttcctcactctagcactaaaaagaagtctacatctcctgtgctcagtgttctgcttggtttaatagctttcatagttttggggattcttgttgtagcttatttgtataggagaaacttgtactctgaagtaagagaggaatgggaaaaagagtatggtccaattaggtattcctacaaatctctatacaaagcaaccaaaggattcaataggagtgaatttcttgggagaggaggttttggtgaagtctacaaaggaactctccctcggagcagagaactgagagaagtagcagtgaagcgagtatcacatgatggtgagcacggtatgaagcaatttgttgctgagatcgtgagcatgaggagtttaaaacaccggagcttggttccacttcttgggtattgcaggagaaaacatgagttattactggtgtctgagtacatgccaaatggtagtcttgaccattacttgtttaatcatgatagattgtctcttccctggtggagaagacttgcgatccttagggacatcgcatcagctcttagttacttacatacagaagctgaccaagttgttatacacagagacatcaaagctgcaaatgttatgttggatgcagagttcaatggaaggttgggagattttggtatgtccaggttatatgacagaggggctgatccaagcacaacagctgcagtgggaactgttggttacatggcacctgagcttacaacaatgggagcttctactggaactgatgtgtacgcgtttggtgttttcttgcttgaagtaacttgtgggaggagacctgtggaacccggcttacctgaagcaaaacgttttctgatcaaatgggttagtgaatgctggaaaaggtcttctttgattgatgctagagatccaaggttgacagaattctcatcccaggaagtcgagaaggttctgaaactcggtttgctatgtgcaaaccttgctccagattcaagaccggccatggaacaagtggtgcaatacttaaatggaaacctagctttacccgagttttggcccaattctccagggattggagttctgtctccaatggcgctttccccagcaccactcgtgatcccttcactatcattttcgtcttcctcctccaacaactctatgtttattactcactcagtcctctacgggagtgggcgatgaaagtttctaacaacttccctcttctttggcctcttaatattgactgattttcagccatttctattcagattttgtttcattaatgtatatggtagcaccatgtccattctccatgaagcttagcttgtagaacgatttttaaaaaactgatttttcaggtaaattcttgcaattacttagttcattatttgtaaagcaagttgttgtcaccatttgagtacagtgataaattgttatgtattgagaaagctgatatagttatggatttgtttcttt

SEQ ID NO: 45 - DNA, 2007 bp, Arabidopsis thaliana
atgattcgaggattgcttttgggaatcatctggatgatattttgtgtttgttcatcatttcagcaagagacgccgtttgtttacaacaactttggtcacgtagatcatcttcaccttgacggtagtgcaagaatcattcccagtggtggtatcctgcaactgacaaatgcaaccaatagccaaataggtcatgttttctacgagaagccgattgagttcaaatcatctgaatcagtctcgttctcgacatattttgtgtgtgcactgctccctgctggtgatccgagtggccatggcatgaccttttttgtgtctcattccactgatttcaaaggcgcagaagcaactcgatacttcgggattttcaacagaaatggttctacttccacacgtgtgttggctgtagagcttgacacttctctagcttcagatgtgaaagacatcagcgataatcatgttgggattgatgtgaacagcgcagagtctattacatctgccaatgcttcttatttttcagacaaagaagggaagaagattgacataaaactcttgagtggtgatcctatccaggtttgggtggactatgaaggaacaacgctcaacgtttcattggctcctcttagaaacaagaaaccaagccgacctcttttgtcatcaacatccatcaatctaactgatattttgcaaggtagaagaatgtttgttgggttttctggctcaaccggatcaagcatgagttaccagtacatactcgggtggagtttcagcaaaagcatggcgtctctgccgaacattgacatctcaaaacttcccaaagttcctcactctagcactaaaaagaagtctacatctcctgtgctcagtgttctgcttggtttaatagctttcatagttttggggattcttgttgtagcttatttgtataggagaaacttgtactctgaagtaagagaggaatgggaaaaagagtatggtccaattaggtattcctacaaatctctatacaaagcaaccaaaggattcaataggagtgaatttcttgggagaggaggttttggtgaagtctacaaaggaactctccctcggagcagagaactgagagaagtagcagtgaagcgagtatcacatgatggtgagcacggtatgaagcaatttgttgctgagatcgtgagcatgaggagtttaaaacaccggagcttggttccacttcttgggtattgcaggagaaaacatgagttattactggtgtctgagtacatgccaaatggtagtcttgaccattacttgtttaatcatgatagattgtctcttccctggtggagaagacttgcgatccttagggacatcgcatcagctcttagttacttacatacagaagctgaccaagttgttatacacagagacatcaaagctgcaaatgttatgttggatgcagagttcaatggaaggttgggagattttggtatgtccaggttatatgacagaggggctgatccaagcacaacagctgcagtgggaactgttggttacatggcacctgagcttacaacaatgggagcttctactggaactgatgtgtacgcgtttggtgttttcttgcttgaagtaacttgtgggaggagacctgtggaacccggcttacctgaagcaaaacgttttctgatcaaatgggttagtgaatgctggaaaaggtcttctttgattgatgctagagatccaaggttgacagaattctcatcccaggaagtcgagaaggttctgaaactcggtttgctatgtgcaaaccttgctccagattcaagaccggccatggaacaagtggtgcaatacttaaatggaaacctagctttacccgagttttggcccaattctccagggattggagttctgtctccaatggcgctttccccagcaccactcgtgatcccttcactatcattttcgtcttcctcctccaacaactctatgtttattactcactcagtcctctacgggagtgggcgatga

SEQ ID NO: 46 - protein, 668 aa, Arabidopsis thaliana; identical to SEQ ID NO: 43

SEQ ID NO: 47 - protein, 682 aa, Zea mays; identical to SEQ ID NO: 27

SEQ ID NO: 48 - protein, 690 aa, Zea mays; identical to SEQ ID NO: 29

SEQ ID NO: 49 - protein, 689 aa, Sorghum bicolor
MAAAAAVTAVRVLVPVLLLALARGGGSAPAAPVQFTFTGFARENVTTSGAAAVATGGGLLQLTNATNWVFGHAFYPAPLRFKDPATGAPISFSTTFVAAILPRYPDAHGHGLAFALAPSAAGPAQAVAGKYLGLFNTSDNVGNGTTSEVVAVELDTAMDVEFDDINNNHVGVDVHSLRSVASKSAGSVDVALASGKLLQVWIEYDGATTRLEVTVSAAAVGVPRPPVPLVSCKVNLSSAVADQTYVGFSAANGAASSSHYVLGWSFLLGGGRAPDLDLSKLPRLPPPPSGHKKATELPLLLSLILLAVVVLLVASAAVTLCVVWRRRRFAEEQEDWEVEYGPHRISYRDLHAATRGFRDVIGGGGFGVVYRGMLPPQPGGVEVAVKKTRGRALREFVSEIASLSRLRHRNLVQLLGYCRRRGELLLVYDYMVNGSLDKRLFGAGGNEPALSWEQRAKIVRDVAAGLLYLHEGWEQVVVHRDIKSANVLLDGDMNGKLSDFGLARLYDHGSDSRTTHVIGTLGYLAPEMIKTGKATPSSDVFAFGAFLLEVACGRRPMESLGNNGDPAGLVDSVLDRWKAGRIKDARDPRIGKCDEDDLELVLKLGLLCSHPDPRCRPNMREVVQILEGAAPVPETPPEDLGGAGVRIFGCYESFDEFVNVFPATFEITAATPPPPCSPSSAEHHQLISG

SEQ ID NO: 50 - protein, 667 aa, Medicago trunculata
MSLKVVAVVFLLATIVVASDDTSFTYNGFQSSYLYLDGSAEFTTNGMLKLTNHTKQQKGHAFFPSPIVFKNTTSGSVFSFSTTFVFAIRSEFPNLSGHGIVFVVSPTKGVPHSLPSQYLGLFDDTNNGNNSNHIFGVELDTILNTEFGDINDNHVGVDVNELKSVKSAAAGYYSDGGFKNLSLISGYPMQVWVEYDGLKKQIDVTLAPINVGKPEGPLLSLSKDLSPILNSSMYVGFSSSTGSILSSHYVLGWSFKVNGKAQQLAISELPMLPRLGGKEESKVLIVGLPLILLSLILMVALAVVHVIKRKKFTELLEDWEQDYGPHRFKYKDLSLVTRGFREKELLGSGGFGRVYKGVMPISKIEVAVKKVSRESRQGMREFVAEIVSIGCLRHRNLVPLLGYCRRKGELLLVYDYMPNGSLDKYLYNKPRVTLNWSQRFKITKGVASGLFYLHEEWEQVVVHRDIKASNVLLDAELNGRLGDFGLSRLYEHGTDPHTTHVVGTLGYLAPEHTRTGKATTSSDVFAFGAFMLEVVCGRRPIEKGGESGSEILVDWVYNCWKKGEILESMDPNLGANYRPDEVELVLKLALLCSHSEPLARPSMRQVVQYLEKDVPLPDLCMLSLSSNGLTFGLHEDFQDCPMSYPSSMNRPISHTSSIAESLLSGGR

SEQ ID NO: 51 - protein, 657 aa, Arabidopsis thaliana; identical to SEQ ID NO: 39

SEQ ID NO: 52 - protein, 670 aa, Sorghum bicolor
MPNLLHIPFLLPLLLSVALNLLCFTTVTSEDQFVYSGFSGNNLTLDGTATVTPDGVLELTNHTVHLKGHAFYPAPWRFRKSPGEMVQSFSVTFVFGMVPIYSDQCTDGMTFLISPTKDFSGAQHSQYLGLLNKTSDGKASNHIFAVELDSSQNTEFNDIDDNHIGININSLTSFQSRSAAFYDDKNGKFQNLSLVSRKEMQVWVDYNGDTAQINVTLAPLRVDKPSKPLLSATYNLSTVLEDPSYIGFSASTGPINSLYCVLGWSLGINSPAPLIDIAKLPKLPDVGPKPLSKVLEIILPIVTATFIILLGTTVILFVRRRMKYAEVQEDWEAEFGPHRFPYKDLFHATDGFKNKNLLGLGGFGKVYKGVLPTSKLEVAVKRVSHESKQGMKEFIAEIVSIGRLRHRNLVQLLGYCRRKGELLLVYDYMSNGSLDKYLHCEEDKPTLNWAQRFQIIKGVASGLLYLHERWEKVVIHRDIKASNVLLDSEMNGRLGDFGLARLYDHGTNPQTTHVVGTMGYIAPELARTGKATPLTDVYAFGIFILEVTCGQRPINSHAEDSSQILIDWVVKHWQEGSLTYTMDTRLQGSYNADEVCLALNLGLMCAHPVCNARPSMRQVIKYLNGEMPLPEMMPTNLSYSVLALMQNEGFDQFTSIVGSSSITSSLSSGR

SEQ ID NO: 53 - protein, 668 aa, Arabidopsis thaliana; identical to SEQ ID NO: 43

SEQ ID NO: 54 - protein, 701 aa, Oryza sativa
MAAPAAVLAVLRWRQRRWLVELVALLLLLARGGAAAVDQFLFPGFSGDGVATSGAAAVTSTGLLQLTNETKEVFGHGFYPKPVSLRNASTGAAASFSTTFVFAIVPKYPDAHGHGLAFALAPSVAVPGAVAGKYLGLFNTSDSTGQIKNKIVAVELDTARDDEFADIDDNHVGIDDNSLKSVNSSPAGYHDAATGGKLASVNLIGGEPLQVWIEYDGDSAWLEVTVSPAGMLRPAAPLVSCTVNLSSAVAGDTYVGFSAANGAAASSHYVLGWSFRLGGGGRAQDLDLAKLPRLPSPSKPKKTLPPLIILTILLLSVVILLLAAAAVAALVVRSRRYAEEEEEWEIEYGPHRISYKDLHGATKGFRDVIGAGGFGSVYHGVLPRSGVEVAVKKVSHDSRQGLREFVSEIASMSRLRHRNLVQLLGYCRRRGELVLVYDYMANGSLDKHLFAGGERPALSWEKRGKIVRDVAAGLLYLHEGWEQVVVHRDIKASNVLLDADMNGKLSDFGLARLYDHGANPQTTRIVGTLGYLAPELSKTGKATTSTDVFAFGAFLLEVACGRRPMEFTVDDDSPGLVELVLEHWKAGEITAARDPRIGDCDEDDLEVVLKLGLLCSHPDPRRRPSMRQVVQILEGAAPAPETLPEDLECGVGQFYDESFDEFVTGFPSTSEITTSTTQSTDEQQRLVGCVQLSTADFLKTT

SEQ ID NO: 55 - protein, 690 aa, Zea mays; identical to SEQ ID NO: 29

SEQ ID NO: 56 - protein, 690 aa, Glycine max; identical to SEQ ID NO: 29

SEQ ID NO: 57 - protein, 657 aa, Arabidopsis thaliana; identical to SEQ ID NO: 39

SEQ ID NO: 58 - protein, 679 aa, Zea mays
MAILLQTPFLVPFLLSMALNLVCFTATVSSEDDHQFVYSGFSGKNLTLNGAAAVTADGVLELTNRTVHVKGHAFYPAPWRFRRSPGETVQSFSVTFVFGMVPIYSDKCTDGMAFLISPTKDFSGAQESQYLGLLNKTSDGKASNHIFAVELDSSENSEFHDIDDNHVGININSLTSFRSLSAGFYDDDDKNGLFQNLSLVSRKEMQVWVDYNGDTTQINVTLAPLKVNVAKPSKPLLTATYNLSTVLAEDPSYVGFSASTGPINSLYCVLGWSLGINAPAPPIDVAKLPKLPRAGPKPRSKLLEIILPIVTATFIILIGTSIFLFVRRRMKYAEVQEDWEAEFGPHRFPYKDLFHATDGFKNKNLLGLGGFGKVYKGVLPVSKLEVAVKRVSHESRQGMKEFIAEIVSIGRLRHRNLVQLLGYCRRKGELLLVYDYMSNGSLDKYLHCEGDKPTLNWDQRFQIIKGVASGLFYLHERWEKVVIHRDIKASNVLLDSEMNGRLGDFGLARLYDHGTNPQTTHVVGTMGYIAPELARTGKATPLTDVYAFGIFILEVTCGQRPISSHAEDSSQVLIDWVVNHWHKGSVTYTVDSRLQCSYNADEVRLALNLGLMCAHPICNARPSMRQVVQYLNGEMPLPEMMPTDLSYSVLAFMQNEGFDQYTSTVGSSGITASSLSSGR

SEQ ID NO: 59 - protein, 668 aa, Arabidopsis thaliana; identical to SEQ ID NO: 43

SEQ ID NO: 60 - DNA, 23 bp, artificial sequence
  primer
atggctaacctcttgcaaacacc

SEQ ID NO: 61 - DNA, 26 bp, artificial sequence
  primer
ggatgtatactggtcaaagccttcat

SEQ ID NO: 62 - DNA, 15663 bp, artificial sequence
  vector
gtttacccgccaatatatcctgtcaaacactgatagtttaaactgaaggcgggaaacgacaatctgatcatgagcggagaattaagggagtcacgttatgacccccgccgatgacgcgggacaagccgttttacgtttggaactgacagaaccgcaacgttgaaggagccactcagcaagctggtacgattgtaatacgactcactatagggcgaattgagcgctgtttaaacgctcttcaactggaagagcggttacccggaccgaagcttgcatgcctgcagtgcagcgtgacccggtcgtgcccctctctagagataatgagcattgcatgtctaagttataaaaaattaccacatattttttttgtcacacttgtttgaagtgcagtttatctatctttatacatatatttaaactttactctacgaataatataatctatagtactacaataatatcagtgttttagagaatcatataaatgaacagttagacatggtctaaaggacaattgagtattttgacaacaggactctacagttttatctttttagtgtgcatgtgttctcctttttttttgcaaatagcttcacctatataatacttcatccattttattagtacatccatttagggtttagggttaatggtttttatagactaatttttttagtacatctattttattctattttagcctctaaattaagaaaactaaaactctattttagtttttttatttaataatttagatataaaatagaataaaataaagtgactaaaaattaaacaaataccctttaagaaattaaaaaaactaaggaaacatttttcttgtttcgagtagataatgccagcctgttaaacgccgtcgacgagtctaacggacaccaaccagcgaaccagcagcgtcgcgtcgggccaagcgaagcagacggcacggcatctctgtcgctgcctctggacccctctcgagagttccgctccaccgttggacttgctccgctgtcggcatccagaaattgcgtggcggagcggcagacgtgagccggcacggcaggcggcctcctcctcctctcacggcacggcagctacgggggattcctttcccaccgctccttcgctttcccttcctcgcccgccgtaataaatagacaccccctccacaccctctttccccaacctcgtgttgttcggagcgcacacacacacaaccagatctcccccaaatccacccgtcggcacctccgcttcaaggtacgccgctcgtcctccccccccccccctctctaccttctctagatcggcgttccggtccatggttagggcccggtagttctacttctgttcatgtttgtgttagatccgtgtttgtgttagatccgtgctgctagcgttcgtacacggatgcgacctgtacgtcagacacgttctgattgctaacttgccagtgtttctctttggggaatcctgggatggctctagccgttccgcagacgggatcgatttcatgattttttttgtttcgttgcatagggtttggtttgcccttttcctttatttcaatatatgccgtgcacttgtttgtcgggtcatcttttcatgcttttttttgtcttggttgtgatgatgtggtctggttgggcggtcgttctagatcggagtagaattctgtttcaaactacctggtggatttattaattttggatctgtatgtgtgtgccatacatattcatagttacgaattgaagatgatggatggaaatatcgatctaggataggtatacatgttgatgcgggttttactgatgcatatacagagatgctttttgttcgcttggttgtgatgatgtggtgtggttgggcggtcgttcattcgttctagatcggagtagaatactgtttcaaactacctggtgtatttattaattttggaactgtatgtgtgtgtcatacatcttcatagttacgagtttaagatggatggaaatatcgatctaggataggtatacatgttgatgtgggttttactgatgcatatacatgatggcatatgcagcatctattcatatgctctaaccttgagtacctatctattataataaacaagtatgttttataattattttgatcttgatatacttggatgatggcatatgcagcagctatatgtggatttttttagccctgccttcatacgctatttatttgcttggtactgtttcttttgtcgatgctcaccctgttgtttggtgttacttctgcaggtcgactctagaggatctacaagtttgtacaaaaaagctgaacgagaaacgtaaaatgatataaatatcaatatattaaattagattttgcataaaaaacagactacataatactgtaaaacacaacatatccagtcactatggcggccgcattaggcaccccaggctttacactttatgcttccggctcgtataatgtgtggattttgagttaggatccggcgagattttcaggagctaaggaagctaaaatggagaaaaaaatcactggatataccaccgttgatatatcccaatggcatcgtaaagaacattttgaggcatttcagtcagttgctcaatgtacctataaccagaccgttcagctggatattacggcctttttaaagaccgtaaagaaaaataagcacaagttttatccggcctttattcacattcttgcccgcctgatgaatgctcatccggaattccgtatggcaatgaaagacggtgagctggtgatatgggatagtgttcacccttgttacaccgttttccatgagcaaactgaaacgttttcatcgctctggagtgaataccacgacgatttccggcagtttctacacatatattcgcaagatgtggcgtgttacggtgaaaacctggcctatttccctaaagggtttattgagaatatgtttttcgtctcagccaatccctgggtgagtttcaccagttttgatttaaacgtggccaatatggacaacttcttcgcccccgttttcaccatgggcaaatattatacgcaaggcgacaaggtgctgatgccgctggcgattcaggttcatcatgccgtctgtgatggcttccatgtcggcagaatgcttaatgaattacaacagtactgcgatgagtggcagggcggggcgtaaacgcgtggatccggcttactaaaagccagataacagtatgcgtatttgcgcgctgatttttgcggtataagaatatatactgatatgtatacccgaagtatgtcaaaaagaggtatgctatgaagcagcgtattacagtgacagttgacagcgacagctatcagttgctcaaggcatatatgatgtcaatatctccggtctggtaagcacaaccatgcagaatgaagcccgtcgtctgcgtgccgaacgctggaaagcggaaaatcaggaagggatggctgaggtcgcccggtttattgaaatgaacggctcttttgctgacgagaacaggggctggtgaaatgcagtttaaggtttacacctataaaagagagagccgttatcgtctgtttgtggatgtacagagtgatattattgacacgcccgggcgacggatggtgatccccctggccagtgcacgtctgctgtcagataaagtctcccgtgaactttacccggtggtgcatatcggggatgaaagctggcgcatgatgaccaccgatatggccagtgtgccggtctccgttatcggggaagaagtggctgatctcagccaccgcgaaaatgacatcaaaaacgccattaacctgatgttctggggaatataaatgtcaggctcccttatacacagccagtctgcaggtcgaccatagtgactggatatgttgtgttttacagtattatgtagtctgttttttatgcaaaatctaatttaatatattgatatttatatcattttacgtttctcgttcagctttcttgtacaaagtggtgttaacctagacttgtccatcttctggattggccaacttaattaatgtatgaaataaaaggatgcacacatagtgacatgctaatcactataatgtgggcatcaaagttgtgtgttatgtgtaattactagttatctgaataaaagagaaagagatcatccatatttcttatcctaaatgaatgtcacgtgtctttataattctttgatgaaccagatgcatttcattaaccaaatccatatacatataaatattaatcatatataattaatatcaattgggttagcaaaacaaatctagtctaggtgtgttttgcgaattgcggccgccaccgcggtggagctcgaattccggtccgggtcacctttgtccaccaagatggaactgcggccgctcattaattaagtcaggcgcgcctctagttgaagacacgttcatgtcttcatcgtaagaagacactcagtagtcttcggccagaatggccatctggattcagcaggcctagaaggccatttaaatcctgaggatctggtcttcctaaggacccgggatatcggaccgaagctggccgctctagaactagtggatctcgatgtgtagtctacgagaagggttaaccgtctcttcgtgagaataaccgtggcctaaaaataagccgatgaggataaataaaatgtggtggtacagtacttcaagaggtttactcatcaagaggatgcttttccgatgagctctagtagtacatcggacctcacatacctccattgtggtgaaatattttgtgctcatttagtgatgggtaaattttgtttatgtcactctaggttttgacatttcagttttgccactcttaggttttgacaaataatttccattccgcggcaaaagcaaaacaattttattttacttttaccactcttagctttcacaatgtatcacaaatgccactctagaaattctgtttatgccacagaatgtgaaaaaaaacactcacttatttgaagccaaggtgttcatggcatggaaatgtgacataaagtaacgttcgtgtataagaaaaaattgtactcctcgtaacaagagacggaaacatcatgagacaatcgcgtttggaaggctttgcatcacctttggatgatgcgcatgaatggagtcgtctgcttgctagccttcgcctaccgcccactgagtccgggcggcaactaccatcggcgaacgacccagctgacctctaccgaccggacttgaatgcgctaccttcgtcagcgacgatggccgcgtacgctggcgacgtgcccccgcatgcatggcggcacatggcgagctcagaccgtgcgtggctggctacaaatacgtaccccgtgagtgccctagctagaaacttacacctgcaactgcgagagcgagcgtgtgagtgtagccgagtagatcccccgggctgcaggtcgactctagaggatccaccggtcgccaccatggcctcctccgagaacgtcatcaccgagttcatgcgcttcaaggtgcgcatggagggcaccgtgaacggccacgagttcgagatcgagggcgagggcgagggccgcccctacgagggccacaacaccgtgaagctgaaggtgacgaagggcggccccctgcccttcgcctgggacatcctgtccccccagttccagtacggctccaaggtgtacgtgaagcaccccgccgacatccccgactacaagaagctgtccttccccgagggcttcaagtgggagcgcgtgatgaacttcgaggacggcggcgtggcgaccgtgacccaggactcctccctgcaggacggctgcttcatctacaaggtgaagttcatcggcgtgaacttcccctccgacggccccgtgatgcagaagaagaccatgggctgggaggcctccaccgagcgcctgtacccccgcgacggcgtgctgaagggcgagacccacaaggccctgaagctgaaggacggcggccactacctggtggagttcaagtccatctacatggccaagaagcccgtgcagctgcccggctactactacgtggacgccaagctggacatcacctcccacaacgaggactacaccatcgtggagcagtacgagcgcaccgagggccgccaccacctgttcctgtagcggcccatggatattcgaacgcgtaggtaccacatggttaacctagacttgtccatcttctggattggccaacttaattaatgtatgaaataaaaggatgcacacatagtgacatgctaatcactataatgtgggcatcaaagttgtgtgttatgtgtaattactagttatctgaataaaagagaaagagatcatccatatttcttatcctaaatgaatgtcacgtgtctttataattctttgatgaaccagatgcatttcattaaccaaatccatatacatataaatattaatcatatataattaatatcaattgggttagcaaaacaaatctagtctaggtgtgttttgcgaatgcggccgccaccgcggtggagctcgaattccggtccgaagcttgcatgcctgcagtgcagcgtgacccggtcgtgcccctctctagagataatgagcattgcatgtctaagttataaaaaattaccacatattttttttgtcacacttgtttgaagtgcagtttatctatctttatacatatatttaaactttactctacgaataatataatctatagtactacaataatatcagtgttttagagaatcatataaatgaacagttagacatggtctaaaggacaattgagtattttgacaacaggactctacagttttatctttttagtgtgcatgtgttctcctttttttttgcaaatagcttcacctatataatacttcatccattttattagtacatccatttagggtttagggttaatggtttttatagactaatttttttagtacatctattttattctattttagcctctaaattaagaaaactaaaactctattttagtttttttatttaataatttagatataaaatagaataaaataaagtgactaaaaattaaacaaataccctttaagaaattaaaaaaactaaggaaacatttttcttgtttcgagtagataatgccagcctgttaaacgccgtcgacgagtctaacggacaccaaccagcgaaccagcagcgtcgcgtcgggccaagcgaagcagacggcacggcatctctgtcgctgcctctggacccctctcgagagttccgctccaccgttggacttgctccgctgtcggcatccagaaattgcgtggcggagcggcagacgtgagccggcacggcaggcggcctcctcctcctctcacggcaccggcagctacgggggattcctttcccaccgctccttcgctttcccttcctcgcccgccgtaataaatagacaccccctccacaccctctttccccaacctcgtgttgttcggagcgcacacacacacaaccagatctcccccaaatccacccgtcggcacctccgcttcaaggtacgccgctcgtcctcccccccccccctctctaccttctctagatcggcgttccggtccatgcatggttagggcccggtagttctacttctgttcatgtttgtgttagatccgtgtttgtgttagatccgtgctgctagcgttcgtacacggatgcgacctgtacgtcagacacgttctgattgctaacttgccagtgtttctctttggggaatcctgggatggctctagccgttccgcagacgggatcgatttcatgattttttttgtttcgttgcatagggtttggtttgcccttttcctttatttcaatatatgccgtgcacttgtttgtcgggtcatcttttcatgcttttttttgtcttggttgtgatgatgtggtctggttgggcggtcgttctagatcggagtagaattctgtttcaaactacctggtggatttattaattttggatctgtatgtgtgtgccatacatattcatagttacgaattgaagatgatggatggaaatatcgatctaggataggtatacatgttgatgcgggttttactgatgcatatacagagatgctttttgttcgcttggttgtgatgatgtggtgtggttgggcggtcgttcattcgttctagatcggagtagaatactgtttcaaactacctggtgtatttattaattttggaactgtatgtgtgtgtcatacatcttcatagttacgagtttaagatggatggaaatatcgatctaggataggtatacatgttgatgtgggttttactgatgcatatacatgatggcatatgcagcatctattcatatgctctaaccttgagtacctatctattataataaacaagtatgttttataattattttgatcttgatatacttggatgatggcatatgcagcagctatatgtggatttttttagccctgccttcatacgctatttatttgcttggtactgtttcttttgtcgatgctcaccctgttgtttggtgttacttctgcaggtcgactttaacttagcctaggatccacacgacaccatgtcccccgagcgccgccccgtcgagatccgcccggccaccgccgccgacatggccgccgtgtgcgacatcgtgaaccactacatcgagacctccaccgtgaacttccgcaccgagccgcagaccccgcaggagtggatcgacgacctggagcgcctccaggaccgctacccgtggctcgtggccgaggtggagggcgtggtggccggcatcgcctacgccggcccgtggaaggcccgcaacgcctacgactggaccgtggagtccaccgtgtacgtgtcccaccgccaccagcgcctcggcctcggctccaccctctacacccacctcctcaagagcatggaggcccagggcttcaagtccgtggtggccgtgatcggcctcccgaacgacccgtccgtgcgcctccacgaggccctcggctacaccgcccgcggcaccctccgcgccgccggctacaagcacggcggctggcacgacgtcggcttctggcagcgcgacttcgagctgccggccccgccgcgcccggtgcgcccggtgacgcagatctgagtcgaaacctagacttgtccatcttctggattggccaacttaattaatgtatgaaataaaaggatgcacacatagtgacatgctaatcactataatgtgggcatcaaagttgtgtgttatgtgtaattactagttatctgaataaaagagaaagagatcatccatatttcttatcctaaatgaatgtcacgtgtctttataattctttgatgaaccagatgcatttcattaaccaaatccatatacatataaatattaatcatatataattaatatcaattgggttagcaaaacaaatctagtctaggtgtgttttgcgaattgcggccgccaccgcggtggagctcgaattcattccgattaatcgtggcctcttgctcttcaggatgaagagctatgtttaaacgtgcaagcgctactagacaattcagtacattaaaaacgtccgcaatgtgttattaagttgtctaagcgtcaatttgtttacaccacaatatatcctgccaccagccagccaacagctccccgaccggcagctcggcacaaaatcaccactcgatacaggcagcccatcagtccgggacggcgtcagcgggagagccgttgtaaggcggcagactttgctcatgttaccgatgctattcggaagaacggcaactaagctgccgggtttgaaacacggatgatctcgcggagggtagcatgttgattgtaacgatgacagagcgttgctgcctgtgatcaaatatcatctccctcgcagagatccgaattatcagccttcttattcatttctcgcttaaccgtgacaggctgtcgatcttgagaactatgccgacataataggaaatcgctggataaagccgctgaggaagctgagtggcgctatttctttagaagtgaacgttgacgatcgtcgaccgtaccccgatgaattaattcggacgtacgttctgaacacagctggatacttacttgggcgattgtcatacatgacatcaacaatgtacccgtttgtgtaaccgtctcttggaggttcgtatgacactagtggttcccctcagcttgcgactagatgttgaggcctaacattttattagagagcaggctagttgcttagatacatgatcttcaggccgttatctgtcagggcaagcgaaaattggccatttatgacgaccaatgccccgcagaagctcccatctttgccgccatagacgccgcgccccccttttggggtgtagaacatccttttgccagatgtggaaaagaagttcgttgtcccattgttggcaatgacgtagtagccggcgaaagtgcgagacccatttgcgctatatataagcctacgatttccgttgcgactattgtcgtaattggatgaactattatcgtagttgctctcagagttgtcgtaatttgatggactattgtcgtaattgcttatggagttgtcgtagttgcttggagaaatgtcgtagttggatggggagtagtcatagggaagacgagcttcatccactaaaacaattggcaggtcagcaagtgcctgccccgatgccatcgcaagtacgaggcttagaaccaccttcaacagatcgcgcatagtcttccccagctctctaacgcttgagttaagccgcgccgcgaagcggcgtcggcttgaacgaattgttagacattatttgccgactaccttggtgatctcgcctttcacgtagtgaacaaattcttccaactgatctgcgcgcgaggccaagcgatcttcttgtccaagataagcctgcctagcttcaagtatgacgggctgatactgggccggcaggcgctccattgcccagtcggcagcgacatccttcggcgcgattttgccggttactgcgctgtaccaaatgcgggacaacgtaagcactacatttcgctcatcgccagcccagtcgggcggcgagttccatagcgttaaggtttcatttagcgcctcaaatagatcctgttcaggaaccggatcaaagagttcctccgccgctggacctaccaaggcaacgctatgttctcttgcttttgtcagcaagatagccagatcaatgtcgatcgtggctggctcgaagatacctgcaagaatgtcattgcgctgccattctccaaattgcagttcgcgcttagctggataacgccacggaatgatgtcgtcgtgcacaacaatggtgacttctacagcgcggagaatctcgctctctccaggggaagccgaagtttccaaaaggtcgttgatcaaagctcgccgcgttgtttcatcaagccttacagtcaccgtaaccagcaaatcaatatcactgtgtggcttcaggccgccatccactgcggagccgtacaaatgtacggccagcaacgtcggttcgagatggcgctcgatgacgccaactacctctgatagttgagtcgatacttcggcgatcaccgcttccctcatgatgtttaactcctgaattaagccgcgccgcgaagcggtgtcggcttgaatgaattgttaggcgtcatcctgtgctcccgagaaccagtaccagtacatcgctgtttcgttcgagacttgaggtctagttttatacgtgaacaggtcaatgccgccgagagtaaagccacattttgcgtacaaattgcaggcaggtacattgttcgtttgtgtctctaatcgtatgccaaggagctgtctgcttagtgcccactttttcgcaaattcgatgagactgtgcgcgactcctttgcctcggtgcgtgtgcgacacaacaatgtgttcgatagaggctagatcgttccatgttgagttgagttcaatcttcccgacaagctcttggtcgatgaatgcgccatagcaagcagagtcttcatcagagtcatcatccgagatgtaatccttccggtaggggctcacacttctggtagatagttcaaagccttggtcggataggtgcacatcgaacacttcacgaacaatgaaatggttctcagcatccaatgtttccgccacctgctcagggatcaccgaaatcttcatatgacgcctaacgcctggcacagcggatcgcaaacctggcgcggcttttggcacaaaaggcgtgacaggtttgcgaatccgttgctgccacttgttaacccttttgccagatttggtaactataatttatgttagaggcgaagtcttgggtaaaaactggcctaaaattgctggggatttcaggaaagtaaacatcaccttccggctcgatgtctattgtagatatatgtagtgtatctacttgatcgggggatctgctgcctcgcgcgtttcggtgatgacggtgaaaacctctgacacatgcagctcccggagacggtcacagcttgtctgtaagcggatgccgggagcagacaagcccgtcagggcgcgtcagcgggtgttggcgggtgtcggggcgcagccatgacccagtcacgtagcgatagcggagtgtatactggcttaactatgcggcatcagagcagattgtactgagagtgcaccatatgcggtgtgaaataccgcacagatgcgtaaggagaaaataccgcatcaggcgctcttccgcttcctcgctcactgactcgctgcgctcggtcgttcggctgcggcgagcggtatcagctcactcaaaggcggtaatacggttatccacagaatcaggggataacgcaggaaagaacatgtgagcaaaaggccagcaaaaggccaggaaccgtaaaaaggccgcgttgctggcgtttttccataggctccgcccccctgacgagcatcacaaaaatcgacgctcaagtcagaggtggcgaaacccgacaggactataaagataccaggcgtttccccctggaagctccctcgtgcgctctcctgttccgaccctgccgcttaccggatacctgtccgcctttctcccttcgggaagcgtggcgctttctcatagctcacgctgtaggtatctcagttcggtgtaggtcgttcgctccaagctgggctgtgtgcacgaaccccccgttcagcccgaccgctgcgccttatccggtaactatcgtcttgagtccaacccggtaagacacgacttatcgccactggcagcagccactggtaacaggattagcagagcgaggtatgtaggcggtgctacagagttcttgaagtggtggcctaactacggctacactagaaggacagtatttggtatctgcgctctgctgaagccagttaccttcggaaaaagagttggtagctcttgatccggcaaacaaaccaccgctggtagcggtggtttttttgtttgcaagcagcagattacgcgcagaaaaaaaggatctcaagaagatcctttgatcttttctacggggtctgacgctcagtggaacgaaaactcacgttaagggattttggtcatgagattatcaaaaaggatcttcacctagatccttttaaattaaaaatgaagttttaaatcaatctaaagtatatatgagtaaacttggtctgacagttaccaatgcttaatcagtgaggcacctatctcagcgatctgtctatttcgttcatccatagttgcctgactccccgtcgtgtagataactacgatacgggagggcttaccatctggccccagtgctgcaatgataccgcgagacccacgctcaccggctccagatttatcagcaataaaccagccagccggaagggccgagcgcagaagtggtcctgcaactttatccgcctccatccagtctattaattgttgccgggaagctagagtaagtagttcgccagttaatagtttgcgcaacgttgttgccattgctgcagggggggggggggggggggacttccattgttcattccacggacaaaaacagagaaaggaaacgacagaggccaaaaagcctcgctttcagcacctgtcgtttcctttcttttcagagggtattttaaataaaaacattaagttatgacgaagaagaacggaaacgccttaaaccggaaaattttcataaatagcgaaaacccgcgaggtcgccgccccgtaacctgtcggatcaccggaaaggacccgtaaagtgataatgattatcatctacatatcacaacgtgcgtggaggccatcaaaccacgtcaaataatcaattatgacgcaggtatcgtattaattgatctgcatcaacttaacgtaaaaacaacttcagacaatacaaatcagcgacactgaatacggggcaacctcatgtcccccccccccccccccctgcaggcatcgtggtgtcacgctcgtcgtttggtatggcttcattcagctccggttcccaacgatcaaggcgagttacatgatcccccatgttgtgcaaaaaagcggttagctccttcggtcctccgatcgttgtcagaagtaagttggccgcagtgttatcactcatggttatggcagcactgcataattctcttactgtcatgccatccgtaagatgcttttctgtgactggtgagtactcaaccaagtcattctgagaatagtgtatgcggcgaccgagttgctcttgcccggcgtcaacacgggataataccgcgccacatagcagaactttaaaagtgctcatcattggaaaacgttcttcggggcgaaaactctcaaggatcttaccgctgttgagatccagttcgatgtaacccactcgtgcacccaactgatcttcagcatcttttactttcaccagcgtttctgggtgagcaaaaacaggaaggcaaaatgccgcaaaaaagggaataagggcgacacggaaatgttgaatactcatactcttcctttttcaatattattgaagcatttatcagggttattgtctcatgagcggatacatatttgaatgtatttagaaaaataaacaaataggggttccgcgcacatttccccgaaaagtgccacctgacgtctaagaaaccattattatcatgacattaacctataaaaataggcgtatcacgaggccctttcgtcttcaagaattggtcgacgatcttgctgcgttcggatattttcgtggagttcccgccacagacccggattgaaggcgagatccagcaactcgcgccagatcatcctgtgacggaactttggcgcgtgatgactggccaggacgtcggccgaaagagcgacaagcagatcacgcttttcgacagcgtcggatttgcgatcgaggatttttcggcgctgcgctacgtccgcgaccgcgttgagggatcaagccacagcagcccactcgaccttctagccgacccagacgagccaagggatctttttggaatgctgctccgtcgtcaggctttccgacgtttgggtggttgaacagaagtcattatcgtacggaatgccaagcactcccgaggggaaccctgtggttggcatgcacatacaaatggacgaacggataaaccttttcacgcccttttaaatatccgttattctaataaacgctcttttctcttag

SEQ ID NO: 63 - DNA, 14265 bp, artificial sequence
  vector
cacatacaaatggacgaacggataaaccttttcacgcccttttaaatatccgttattctaataaacgctcttttctcttaggtttacccgccaatatatcctgtcaaacactgatagtttaaactgaaggcgggaaacgacaatctgatcatgagcggagaattaagggagtcacgttatgacccccgccgatgacgcgggacaagccgttttacgtttggaactgacagaaccgcaacgttgaaggagccactcagcaagctggtacgattgtaatacgactcactatagggcgaattgagcgctgtttaaacgctcttcaactggaagagcggttactaccggctggatggcggggccttgatcgtgcaccgccggcgtccggataagtgactagggtcacgtgaccctagtcacttatcgagctagttaccctatgaggtgacatgaagcgctcacggttactatgacggttagcttcacgactgttggtggcagtagcgtacgacttagctatagttccggtagatctgaagttcctattccgaagttcctattcttcaaaaggtataggaacttcctcgaattgttgtggtggggtatagaggtttgatataggtggaactgctgtagagcgtggagatatagggggaaagagaacgctgatgtgacaagtgagtgagatatagggggagaaatttagggggaacgccgaacacagtctaaagaagcttgggacccaaagcactctgttcgggggtttttttttttgtctttcaactttttgctgtaatgttattcaaaataagaaaagcacttggcatggctaagaaatagagttcaacaactgaacagtacagtgtattatcaatggcataaaaaacaacccttacagcattgccgtattttattgatcaaacattcaactcaacactgacgagtggtcttccaccgatcaacggactaatgctgctttgtcagatcaccggttaagtgactagggtcacgtgaccctagtcacttaggttaccagagctggtcacctttgtccaccaagatggaactgcggccgctcattaattaagtcaggcgcgcctctagttgaagacacgttcatgtcttcatcgtaagaagacactcagtagtcttcggccagaatggccatctggattcagcaggcataacttcgtataatgtatgctatacgaagttatctctagaactagtggatctcgatgtgtagtctacgagaagggttaaccgtctcttcgtgagaataaccgtggcctaaaaataagccgatgaggataaataaaatgtggtggtacagtacttcaagaggtttactcatcaagaggatgcttttccgatgagctctagtagtacatcggacctcacatacctccattgtggtgaaatattttgtgctcatttagtgatgggtaaattttgtttatgtcactctaggttttgacatttcagttttgccactcttaggttttgacaaataatttccattccgcggcaaaagcaaaacaattttattttacttttaccactcttagctttcacaatgtatcacaaatgccactctagaaattctgtttatgccacagaatgtgaaaaaaaacactcacttatttgaagccaaggtgttcatggcatggaaatgtgacataaagtaacgttcgtgtataagaaaaaattgtactcctcgtaacaagagacggaaacatcatgagacaatcgcgtttggaaggctttgcatcacctttggatgatgcgcatgaatggagtcgtctgcttgctagccttcgcctaccgcccactgagtccgggcggcaactaccatcggcgaacgacccagctgacctctaccgaccggacttgaatgcgctaccttcgtcagcgacgatggccgcgtacgctggcgacgtgcccccgcatgcatggcggcacatggcgagctcagaccgtgcgtggctggctacaaatacgtaccccgtgagtgccctagctagaaacttacacctgcaactgcgagagcgagcgtgtgagtgtagccgagtagatcccccggtcgccaccatggcctcctccgagaacgtcatcaccgagttcatgcgcttcaaggtgcgcatggagggcaccgtgaacggccacgagttcgagatcgagggcgagggcgagggccgcccctacgagggccacaacaccgtgaagctgaaggtgaccaagggcggccccctgcccttcgcctgggacatcctgtccccccagttccagtacggctccaaggtgtacgtgaagcaccccgccgacatccccgactacaagaagctgtccttccccgagggcttcaagtgggagcgcgtgatgaacttcgaggacggcggcgtggcgaccgtgacccaggactcctccctgcaggacggctgcttcatctacaaggtgaagttcatcggcgtgaacttcccctccgacggccccgtgatgcagaagaagaccatgggctgggaggcctccaccgagcgcctgtacccccgcgacggcgtgctgaagggcgagacccacaaggccctgaagctgaaggacggcggccactacctggtggagttcaagtccatctacatggccaagaagcccgtgcagctgcccggctactactacgtggacgccaagctggacatcacctcccacaacgaggactacaccatcgtggagcagtacgagcgcaccgagggccgccaccacctgttcctgtagcggcccatggatattcgaacgcgtaggtaccacatggttaacctagacttgtccatcttctggattggccaacttaattaatgtatgaaataaaaggatgcacacatagtgacatgctaatcactataatgtgggcatcaaagttgtgtgttatgtgtaattactagttatctgaataaaagagaaagagatcatccatatttcttatcctaaatgaatgtcacgtgtctttataattctttgatgaaccagatgcatttcattaaccaaatccatatacatataaatattaatcatatataattaatatcaattgggttagcaaaacaaatctagtctaggtgtgttttgcgaatgcggccataacttcgtataatgtatgctatacgaagttatctagaaggccatttaaatcctgaggatctggtcttcctaaggacccgggatatcgctatcaactttgtatagaaaagttgaacgagaaacgtaaaatgatataaatatcaatatattaaattagattttgcataaaaaacagactacataatactgtaaaacacaacatatccagtcactatggtcgacctgcagactggctgtgtataagggagcctgacatttatattccccagaacatcaggttaatggcgtttttgatgtcattttcgcggtggctgagatcagccacttcttccccgataacggagaccggcacactggccatatcggtggtcatcatgcgccagctttcatccccgatatgcaccaccgggtaaagttcacgggggactttatctgacagcagacgtgcactggccagggggatcaccatccgtcgcccgggcgtgtcaataatatcactctgtacatccacaaacagacgataacggctctctcttttataggtgtaaaccttaaactgcatttcaccagcccctgttctcgtcggcaaaagagccgttcatttcaataaaccgggcgacctcagccatcccttcctgattttccgctttccagcgttcggcacgcagacgacgggcttcattctgcatggttgtgcttaccgaaccggagatattgacatcatatatgccttgagcaactgatagctgtcgctgtcaactgtcactgtaatacgctgcttcatagcatacctctttttgacatacttcgggtatacatatcagtatatattcttataccgcaaaaatcagcgcgcaaatacgcatactgttatctggcttttagtaagccggatcctctagattacgccccgcctgccactcatcgcagtactgttgtaattcattaagcattctgccgacatggaagccatcacaaacggcatgatgaacctgaatcgccagcggcatcagcaccttgtcgccttgcgtataatatttgcccatggtgaaaacgggggcgaagaagttgtccatattggccacgtttaaatcaaaactggtgaaactcacccagggattggctgagacgaaaaacatattctcaataaaccctttagggaaataggccaggttttcaccgtaacacgccacatcttgcgaatatatgtgtagaaactgccggaaatcgtcgtggtattcactccagagcgatgaaaacgtttcagtttgctcatggaaaacggtgtaacaagggtgaacactatcccatatcaccagctcaccgtctttcattgccatacggaattccggatgagcattcatcaggcgggcaagaatgtgaataaaggccggataaaacttgtgcttatttttctttacggtctttaaaaaggccgtaatatccagctgaacggtctggttataggtacattgagcaactgactgaaatgcctcaaaatgttctttacgatgccattgggatatatcaacggtggtatatccagtgatttttttctccattttagcttccttagctcctgaaaatctcgacggatcctaactcaaaatccacacattatacgagccggaagcataaagtgtaaagcctggggtgccctaatgcggccgccatagtgactggatatgttgtgttttacagtattatgtagtctgttttttatgcaaaatctaatttaatatattgatatttatatcattttacgtttctcgttcaactttattatacaaagttgatagatatcggaccgattaaactttaattcggtccgatgcatgtatacgaagttcctattccgaagttcctattctacatagagtataggaacttcacctggtggcgccgctagtggatcccccgggctgcagtgcagcgtgacccggtcgtgcccctctctagagataatgagcattgcatgtctaagttataaaaaattaccacatattttttttgtcacacttgtttgaagtgcagtttatctatctttatacatatatttaaactttactctacgaataatataatctatagtactacaataatatcagtgttttagagaatcatataaatgaacagttagacatggtctaaaggacaattgagtattttgacaacaggactctacagttttatctttttagtgtgcatgtgttctcctttttttttgcaaatagcttcacctatataatacttcatccattttattagtacatccatttagggtttagggttaatggtttttatagactaatttttttagtacatctattttattctattttagcctctaaattaagaaaactaaaactctattttagtttttttatttaataatttagatataaaatagaataaaataaagtgactaaaaattaaacaaataccctttaagaaattaaaaaaactaaggaaacatttttcttgtttcgagtagataatgccagcctgttaaacgccgtcgacgagtctaacggacaccaaccagcgaaccagcagcgtcgcgtcgggccaagcgaagcagacggcacggcatctctgtcgctgcctctggacccctctcgagagttccgctccaccgttggacttgctccgctgtcggcatccagaaattgcgtggcggagcggcagacgtgagccggcacggcaggcggcctcctcctcctctcacggcaccggcagctacgggggattcctttcccaccgctccttcgctttcccttcctcgcccgccgtaataaatagacaccccctccacaccctctttccccaacctcgtgttgttcggagcgcacacacacacaaccagatctcccccaaatccacccgtcggcacctccgcttcaaggtacgccgctcgtcctcccccccccccctctctaccttctctagatcggcgttccggtccatgcatggttagggcccggtagttctacttctgttcatgtttgtgttagatccgtgtttgtgttagatccgtgctgctagcgttcgtacacggatgcgacctgtacgtcagacacgttctgattgctaacttgccagtgtttctctttggggaatcctgggatggctctagccgttccgcagacgggatcgatttcatgattttttttgtttcgttgcatagggtttggtttgcccttttcctttatttcaatatatgccgtgcacttgtttgtcgggtcatcttttcatgcttttttttgtcttggttgtgatgatgtggtctggttgggcggtcgttctagatcggagtagaattctgtttcaaactacctggtggatttattaattttggatctgtatgtgtgtgccatacatattcatagttacgaattgaagatgatggatggaaatatcgatctaggataggtatacatgttgatgcgggttttactgatgcatatacagagatgctttttgttcgcttggttgtgatgatgtggtgtggttgggcggtcgttcattcgttctagatcggagtagaatactgtttcaaactacctggtgtatttattaattttggaactgtatgtgtgtgtcatacatcttcatagttacgagtttaagatggatggaaatatcgatctaggataggtatacatgttgatgtgggttttactgatgcatatacatgatggcatatgcagcatctattcatatgctctaaccttgagtacctatctattataataaacaagtatgttttataattattttgatcttgatatacttggatgatggcatatgcagcagctatatgtggatttttttagccctgccttcatacgctatttatttgcttggtactgtttcttttgtcgatgctcaccctgttgtttggtgttacttctgcaggtcgactttaacttagcctaggatccacacgacaccatgtcccccgagcgccgccccgtcgagatccgcccggccaccgccgccgacatggccgccgtgtgcgacatcgtgaaccactacatcgagacctccaccgtgaacttccgcaccgagccgcagaccccgcaggagtggatcgacgacctggagcgcctccaggaccgctacccgtggctcgtggccgaggtggagggcgtggtggccggcatcgcctacgccggcccgtggaaggcccgcaacgcctacgactggaccgtggagtccaccgtgtacgtgtcccaccgccaccagcgcctcggcctcggctccaccctctacacccacctcctcaagagcatggaggcccagggcttcaagtccgtggtggccgtgatcggcctcccgaacgacccgtccgtgcgcctccacgaggccctcggctacaccgcccgcggcaccctccgcgccgccggctacaagcacggcggctggcacgacgtcggcttctggcagcgcgacttcgagctgccggccccgccgcgcccggtgcgcccggtgacgcagatctgagtcgaaacctagacttgtccatcttctggattggccaacttaattaatgtatgaaataaaaggatgcacacatagtgacatgctaatcactataatgtgggcatcaaagttgtgtgttatgtgtaattactagttatctgaataaaagagaaagagatcatccatatttcttatcctaaatgaatgtcacgtgtctttataattctttgatgaaccagatgcatttcattaaccaaatccatatacatataaatattaatcatatataattaatatcaattgggttagcaaaacaaatctagtctaggtgtgttttgcgaattgcggccgctctagcgtatacgaagttcctattccgaagttcctattctctagaaagtataggaacttctgattccgatgacttcgtaggttcctagctcaagccgctcgtgtccaagcgtcacttacgattagctaatgattacggcatctaggaccgactagtaagtgactagggtcacgtgaccctagtcacttatacgtagaattaattcattccgattaatcgtggcctcttgctcttcaggatgaagagctatgtttaaacgtgcaagcgctactagacaattcagtacattaaaaacgtccgcaatgtgttattaagttgtctaagcgtcaatttgtttacaccacaatatatcctgccaccagccagccaacagctccccgaccggcagctcggcacaaaatcaccactcgatacaggcagcccatcagtccgggacggcgtcagcgggagagccgttgtaaggcggcagactttgctcatgttaccgatgctattcggaagaacggcaactaagctgccgggtttgaaacacggatgatctcgcggagggtagcatgttgattgtaacgatgacagagcgttgctgcctgtgatcaaatatcatctccctcgcagagatccgaattatcagccttcttattcatttctcgcttaaccgtgacaggctgtcgatcttgagaactatgccgacataataggaaatcgctggataaagccgctgaggaagctgagtggcgctatttctttagaagtgaacgttgacgatcgtcgaccgtaccccgatgaattaattcggacgtacgttctgaacacagctggatacttacttgggcgattgtcatacatgacatcaacaatgtacccgtttgtgtaaccgtctcttggaggttcgtatgacactagtggttcccctcagcttgcgactagatgttgaggcctaacattttattagagagcaggctagttgcttagatacatgatcttcaggccgttatctgtcagggcaagcgaaaattggccatttatgacgaccaatgccccgcagaagctcccatctttgccgccatagacgccgcgccccccttttggggtgtagaacatccttttgccagatgtggaaaagaagttcgttgtcccattgttggcaatgacgtagtagccggcgaaagtgcgagacccatttgcgctatatataagcctacgatttccgttgcgactattgtcgtaattggatgaactattatcgtagttgctctcagagttgtcgtaatttgatggactattgtcgtaattgcttatggagttgtcgtagttgcttggagaaatgtcgtagttggatggggagtagtcatagggaagacgagcttcatccactaaaacaattggcaggtcagcaagtgcctgccccgatgccatcgcaagtacgaggcttagaaccaccttcaacagatcgcgcatagtcttccccagctctctaacgcttgagttaagccgcgccgcgaagcggcgtcggcttgaacgaattgttagacattatttgccgactaccttggtgatctcgcctttcacgtagtgaacaaattcttccaactgatctgcgcgcgaggccaagcgatcttcttgtccaagataagcctgcctagcttcaagtatgacgggctgatactgggccggcaggcgctccattgcccagtcggcagcgacatccttcggcgcgattttgccggttactgcgctgtaccaaatgcgggacaacgtaagcactacatttcgctcatcgccagcccagtcgggcggcgagttccatagcgttaaggtttcatttagcgcctcaaatagatcctgttcaggaaccggatcaaagagttcctccgccgctggacctaccaaggcaacgctatgttctcttgcttttgtcagcaagatagccagatcaatgtcgatcgtggctggctcgaagatacctgcaagaatgtcattgcgctgccattctccaaattgcagttcgcgcttagctggataacgccacggaatgatgtcgtcgtgcacaacaatggtgacttctacagcgcggagaatctcgctctctccaggggaagccgaagtttccaaaaggtcgttgatcaaagctcgccgcgttgtttcatcaagccttacagtcaccgtaaccagcaaatcaatatcactgtgtggcttcaggccgccatccactgcggagccgtacaaatgtacggccagcaacgtcggttcgagatggcgctcgatgacgccaactacctctgatagttgagtcgatacttcggcgatcaccgcttccctcatgatgtttaactcctgaattaagccgcgccgcgaagcggtgtcggcttgaatgaattgttaggcgtcatcctgtgctcccgagaaccagtaccagtacatcgctgtttcgttcgagacttgaggtctagttttatacgtgaacaggtcaatgccgccgagagtaaagccacattttgcgtacaaattgcaggcaggtacattgttcgtttgtgtctctaatcgtatgccaaggagctgtctgcttagtgcccactttttcgcaaattcgatgagactgtgcgcgactcctttgcctcggtgcgtgtgcgacacaacaatgtgttcgatagaggctagatcgttccatgttgagttgagttcaatcttcccgacaagctcttggtcgatgaatgcgccatagcaagcagagtcttcatcagagtcatcatccgagatgtaatccttccggtaggggctcacacttctggtagatagttcaaagccttggtcggataggtgcacatcgaacacttcacgaacaatgaaatggttctcagcatccaatgtttccgccacctgctcagggatcaccgaaatcttcatatgacgcctaacgcctggcacagcggatcgcaaacctggcgcggcttttggcacaaaaggcgtgacaggtttgcgaatccgttgctgccacttgttaacccttttgccagatttggtaactataatttatgttagaggcgaagtcttgggtaaaaactggcctaaaattgctggggatttcaggaaagtaaacatcaccttccggctcgatgtctattgtagatatatgtagtgtatctacttgatcgggggatctgctgcctcgcgcgtttcggtgatgacggtgaaaacctctgacacatgcagctcccggagacggtcacagcttgtctgtaagcggatgccgggagcagacaagcccgtcagggcgcgtcagcgggtgttggcgggtgtcggggcgcagccatgacccagtcacgtagcgatagcggagtgtatactggcttaactatgcggcatcagagcagattgtactgagagtgcaccatatgcggtgtgaaataccgcacagatgcgtaaggagaaaataccgcatcaggcgctcttccgcttcctcgctcactgactcgctgcgctcggtcgttcggctgcggcgagcggtatcagctcactcaaaggcggtaatacggttatccacagaatcaggggataacgcaggaaagaacatgtgagcaaaaggccagcaaaaggccaggaaccgtaaaaaggccgcgttgctggcgtttttccataggctccgcccccctgacgagcatcacaaaaatcgacgctcaagtcagaggtggcgaaacccgacaggactataaagataccaggcgtttccccctggaagctccctcgtgcgctctcctgttccgaccctgccgcttaccggatacctgtccgcctttctcccttcgggaagcgtggcgctttctcatagctcacgctgtaggtatctcagttcggtgtaggtcgttcgctccaagctgggctgtgtgcacgaaccccccgttcagcccgaccgctgcgccttatccggtaactatcgtcttgagtccaacccggtaagacacgacttatcgccactggcagcagccactggtaacaggattagcagagcgaggtatgtaggcggtgctacagagttcttgaagtggtggcctaactacggctacactagaaggacagtatttggtatctgcgctctgctgaagccagttaccttcggaaaaagagttggtagctcttgatccggcaaacaaaccaccgctggtagcggtggtttttttgtttgcaagcagcagattacgcgcagaaaaaaaggatctcaagaagatcctttgatcttttctacggggtctgacgctcagtggaacgaaaactcacgttaagggattttggtcatgagattatcaaaaaggatcttcacctagatccttttaaattaaaaatgaagttttaaatcaatctaaagtatatatgagtaaacttggtctgacagttaccaatgcttaatcagtgaggcacctatctcagcgatctgtctatttcgttcatccatagttgcctgactccccgtcgtgtagataactacgatacgggagggcttaccatctggccccagtgctgcaatgataccgcgagacccacgctcaccggctccagatttatcagcaataaaccagccagccggaagggccgagcgcagaagtggtcctgcaactttatccgcctccatccagtctattaattgttgccgggaagctagagtaagtagttcgccagttaatagtttgcgcaacgttgttgccattgctgcagggggggggggggggggggacttccattgttcattccacggacaaaaacagagaaaggaaacgacagaggccaaaaagcctcgctttcagcacctgtcgtttcctttcttttcagagggtattttaaataaaaacattaagttatgacgaagaagaacggaaacgccttaaaccggaaaattttcataaatagcgaaaacccgcgaggtcgccgccccgtaacctgtcggatcaccggaaaggacccgtaaagtgataatgattatcatctacatatcacaacgtgcgtggaggccatcaaaccacgtcaaataatcaattatgacgcaggtatcgtattaattgatctgcatcaacttaacgtaaaaacaacttcagacaatacaaatcagcgacactgaatacggggcaacctcatgtcccccccccccccccccctgcaggcatcgtggtgtcacgctcgtcgtttggtatggcttcattcagctccggttcccaacgatcaaggcgagttacatgatcccccatgttgtgcaaaaaagcggttagctccttcggtcctccgatcgttgtcagaagtaagttggccgcagtgttatcactcatggttatggcagcactgcataattctcttactgtcatgccatccgtaagatgcttttctgtgactggtgagtactcaaccaagtcattctgagaatagtgtatgcggcgaccgagttgctcttgcccggcgtcaacacgggataataccgcgccacatagcagaactttaaaagtgctcatcattggaaaacgttcttcggggcgaaaactctcaaggatcttaccgctgttgagatccagttcgatgtaacccactcgtgcacccaactgatcttcagcatcttttactttcaccagcgtttctgggtgagcaaaaacaggaaggcaaaatgccgcaaaaaagggaataagggcgacacggaaatgttgaatactcatactcttcctttttcaatattattgaagcatttatcagggttattgtctcatgagcggatacatatttgaatgtatttagaaaaataaacaaataggggttccgcgcacatttccccgaaaagtgccacctgacgtctaagaaaccattattatcatgacattaacctataaaaataggcgtatcacgaggccctttcgtcttcaagaattggtcgacgatcttgctgcgttcggatattttcgtggagttcccgccacagacccggattgaaggcgagatccagcaactcgcgccagatcatcctgtgacggaactttggcgcgtgatgactggccaggacgtcggccgaaagagcgacaagcagatcacgcttttcgacagcgtcggatttgcgatcgaggatttttcggcgctgcgctacgtccgcgaccgcgttgagggatcaagccacagcagcccactcgaccttctagccgacccagacgagccaagggatctttttggaatgctgctccgtcgtcaggctttccgacgtttgggtggttgaacagaagtcattatcgtacggaatgccaagcactcccgaggggaaccctgtggttggcatg

SEQ ID NO: 64 - DNA, 13228 bp, artificial sequence
  vector
aagctggtacgattgtaatacgactcactatagggcgaattgagcgctgtttaaacgctcttcaactggaagagcggttacccggaccgaagcttgcatgcctgcagtgcagcgtgacccggtcgtgcccctctctagagataatgagcattgcatgtctaagttataaaaaattaccacatattttttttgtcacacttgtttgaagtgcagtttatctatctttatacatatatttaaactttactctacgaataatataatctatagtactacaataatatcagtgttttagagaatcatataaatgaacagttagacatggtctaaaggacaattgagtattttgacaacaggactctacagttttatctttttagtgtgcatgtgttctcctttttttttgcaaatagcttcacctatataatacttcatccattttattagtacatccatttagggtttagggttaatggtttttatagactaatttttttagtacatctattttattctattttagcctctaaattaagaaaactaaaactctattttagtttttttatttaataatttagatataaaatagaataaaataaagtgactaaaaattaaacaaataccctttaagaaattaaaaaaactaaggaaacatttttcttgtttcgagtagataatgccagcctgttaaacgccgtcgacgagtctaacggacaccaaccagcgaaccagcagcgtcgcgtcgggccaagcgaagcagacggcacggcatctctgtcgctgcctctggacccctctcgagagttccgctccaccgttggacttgctccgctgtcggcatccagaaattgcgtggcggagcggcagacgtgagccggcacggcaggcggcctcctcctcctctcacggcacggcagctacgggggattcctttcccaccgctccttcgctttcccttcctcgcccgccgtaataaatagacaccccctccacaccctctttccccaacctcgtgttgttcggagcgcacacacacacaaccagatctcccccaaatccacccgtcggcacctccgcttcaaggtacgccgctcgtcctccccccccccccctctctaccttctctagatcggcgttccggtccatggttagggcccggtagttctacttctgttcatgtttgtgttagatccgtgtttgtgttagatccgtgctgctagcgttcgtacacggatgcgacctgtacgtcagacacgttctgattgctaacttgccagtgtttctctttggggaatcctgggatggctctagccgttccgcagacgggatcgatttcatgattttttttgtttcgttgcatagggtttggtttgcccttttcctttatttcaatatatgccgtgcacttgtttgtcgggtcatcttttcatgcttttttttgtcttggttgtgatgatgtggtctggttgggcggtcgttctagatcggagtagaattctgtttcaaactacctggtggatttattaattttggatctgtatgtgtgtgccatacatattcatagttacgaattgaagatgatggatggaaatatcgatctaggataggtatacatgttgatgcgggttttactgatgcatatacagagatgctttttgttcgcttggttgtgatgatgtggtgtggttgggcggtcgttcattcgttctagatcggagtagaatactgtttcaaactacctggtgtatttattaattttggaactgtatgtgtgtgtcatacatcttcatagttacgagtttaagatggatggaaatatcgatctaggataggtatacatgttgatgtgggttttactgatgcatatacatgatggcatatgcagcatctattcatatgctctaaccttgagtacctatctattataataaacaagtatgttttataattattttgatcttgatatacttggatgatggcatatgcagcagctatatgtggatttttttagccctgccttcatacgctatttatttgcttggtactgtttcttttgtcgatgctcaccctgttgtttggtgttacttctgcaggtcgactctagaggatctacaagtttgtacaaaaaagctgaacgagaaacgtaaaatgatataaatatcaatatattaaattagattttgcataaaaaacagactacataatactgtaaaacacaacatatccagtcactatggcggccgcattaggcaccccaggctttacactttatgcttccggctcgtataatgtgtggattttgagttaggatccggcgagattttcaggagctaaggaagctaaaatggagaaaaaaatcactggatataccaccgttgatatatcccaatggcatcgtaaagaacattttgaggcatttcagtcagttgctcaatgtacctataaccagaccgttcagctggatattacggcctttttaaagaccgtaaagaaaaataagcacaagttttatccggcctttattcacattcttgcccgcctgatgaatgctcatccggaattccgtatggcaatgaaagacggtgagctggtgatatgggatagtgttcacccttgttacaccgttttccatgagcaaactgaaacgttttcatcgctctggagtgaataccacgacgatttccggcagtttctacacatatattcgcaagatgtggcgtgttacggtgaaaacctggcctatttccctaaagggtttattgagaatatgtttttcgtctcagccaatccctgggtgagtttcaccagttttgatttaaacgtggccaatatggacaacttcttcgcccccgttttcaccatgggcaaatattatacgcaaggcgacaaggtgctgatgccgctggcgattcaggttcatcatgccgtctgtgatggcttccatgtcggcagaatgcttaatgaattacaacagtactgcgatgagtggcagggcggggcgtaaacgcgtggatccggcttactaaaagccagataacagtatgcgtatttgcgcgctgatttttgcggtataagaatatatactgatatgtatacccgaagtatgtcaaaaagaggtatgctatgaagcagcgtattacagtgacagttgacagcgacagctatcagttgctcaaggcatatatgatgtcaatatctccggtctggtaagcacaaccatgcagaatgaagcccgtcgtctgcgtgccgaacgctggaaagcggaaaatcaggaagggatggctgaggtcgcccggtttattgaaatgaacggctcttttgctgacgagaacaggggctggtgaaatgcagtttaaggtttacacctataaaagagagagccgttatcgtctgtttgtggatgtacagagtgatattattgacacgcccgggcgacggatggtgatccccctggccagtgcacgtctgctgtcagataaagtctcccgtgaactttacccggtggtgcatatcggggatgaaagctggcgcatgatgaccaccgatatggccagtgtgccggtctccgttatcggggaagaagtggctgatctcagccaccgcgaaaatgacatcaaaaacgccattaacctgatgttctggggaatataaatgtcaggctcccttatacacagccagtctgcaggtcgaccatagtgactggatatgttgtgttttacagtattatgtagtctgttttttatgcaaaatctaatttaatatattgatatttatatcattttacgtttctcgttcagctttcttgtacaaagtggtgttaacctagacttgtccatcttctggattggccaacttaattaatgtatgaaataaaaggatgcacacatagtgacatgctaatcactataatgtgggcatcaaagttgtgtgttatgtgtaattactagttatctgaataaaagagaaagagatcatccatatttcttatcctaaatgaatgtcacgtgtctttataattctttgatgaaccagatgcatttcattaaccaaatccatatacatataaatattaatcatatataattaatatcaattgggttagcaaaacaaatctagtctaggtgtgttttgcgaattgcggccgccaccgcggtggagctcgaattccggtccgggtcacctttgtccaccaagatggaactgcggccgctcattaattaagtcaggcgcgcctctagttgaagacacgttcatgtcttcatcgtaagaagacactcagtagtcttcggccagaatggcccggaccgaagcttctgcaggaattctgagctagcgaagttcctattccgaagttcctattcttcaaaaagtataggaacttcagacgtcctcgagtccgtcctgtagaaaccccaacccgtgaaatcaaaaaactcgacggcctgtgggcattcagtctggatcgcgaaaactgtggaattgatccagaattcgctagcgaagttcctattccgaagttcctattctctagaaagtataggaacttcagatctgagcttctagaaatccgtcaacatggtggagcacgacactctcgtctactccaagaatatcaaagatacagtctcagaagaccaaagggctattgagacttttcaacaaagggtaatatcgggaaacctcctcggattccattgcccagctatctgtcacttcatcaaaaggacagtagaaaaggaaggtggcacctacaaatgccatcattgcgataaaggaaaggctatcgttcaagatgcctctgccgacagtggtcccaaagatggacccccacccacgaggagcatcgtggaaaaagaagacgttccaaccacgtcttcaaagcaagtggattgatgtgatgctctagaaatccgtcaacatggtggagcacgacactctcgtctactccaagaatatcaaagatacagtctcagaagaccaaagggctattgagacttttcaacaaagggtaatatcgggaaacctcctcggattccattgcccagctatctgtcacttcatcaaaaggacagtagaaaaggaaggtggcacctacaaatgccatcattgcgataaaggaaaggctatcgttcaagatgcctctgccgacagtggtcccaaagatggacccccacccacgaggagcatcgtggaaaaagaagacgttccaaccacgtcttcaaagcaagtggattgatgtgatatctccactgacgtaagggatgacgcacaatcccactatccttcgcaagacccttcctctatataaggaagttcatttcatttggagaggacgagctgcaggtcgacggatcaagtgcaaaggtccgccttgtttctcctctgtctcttgatctgactaatcttggtttatgattcgttgagtaattttggggaaagcttcgtccacagtttttttttcgatgaacagtgccgcagtggcgctgatcttgtatgctatcctgcaatcgtggtgaacttatgtcttttatatccttcactaccatgaaaaggctagtaatctttctcgatgtaacatcgtccagcactgctattaccgtgtggtccatccgacagtctggctgaacacatcatacgatattgagcaaagatcgatctatcttccctgttctttaatgaaagacgtcattttcatcagtatgatctaagaatgttgcaacttgcaaggaggcgtttctttctttgaatttaactaactcgttgagtggccctgtttctcggacgtaaggcctttgctgctccacacatgtccattcgaattttaccgtgtttagcaagggcgaaaagtttgcatcttgatgatttagcttgactatgcgattgctttcctggacccgtgcagctgcggacggatccaccatgagcccagaacgacgcccggccgacatccgccgtgccaccgaggcggacatgccggcggtctgcaccatcgtcaaccactacatcgagacaagcacggtcaacttccgtaccgagccgcaggaaccgcaggactggacggacgacctcgtccgtctgcgggagcgctatccctggctcgtcgccgaggtggacggcgaggtcgccggcatcgcctacgcgggcccctggaaggcacgcaacgcctacgactggacggccgagtcgaccgtgtacgtctccccccgccaccagcggacgggactgggctccacgctctacacccacctgctgaagtccctggaggcacagggcttcaagagcgtggtcgctgtcatcgggctgcccaacgacccgagcgtgcgcatgcacgaggcgctcggatatgccccccgcggcatgctgcgggcggccggcttcaagcacgggaactggcatgacgtgggtttctggcagctggacttcagcctgccggtaccgccccgtccggtcctgcccgtcaccgagatctgatccgtcgaccaacctagacttgtccatcttctggattggccaacttaattaatgtatgaaataaaaggatgcacacatagtgacatgctaatcactataatgtgggcatcaaagttgtgtgttatgtgtaattactagttatctgaataaaagagaaagagatcatccatatttcttatcctaaatgaatgtcacgtgtctttataattctttgatgaaccagatgcatttcattaaccaaatccatatacatataaatattaatcatatataattaatatcaattgggttagcaaaacaaatctagtctaggtgtgttttgcgaattgcggccgctctagcgaagttcctattccgaagttcctattctctagaaagtataggaacttcagatccagaattcggtccgggccatcgtggcctcttgctcttcaggatgaagagctatgtttaaacgtgcaagcgctactagacaattcagtacattaaaaacgtccgcaatgtgttattaagttgtctaagcgtcaatttgtttacaccacaatatatcctgccaccagccagccaacagctccccgaccggcagctcggcacaaaatcaccactcgatacaggcagcccatcagtccgggacggcgtcagcgggagagccgttgtaaggcggcagactttgctcatgttaccgatgctattcggaagaacggcaactaagctgccgggtttgaaacacggatgatctcgcggagggtagcatgttgattgtaacgatgacagagcgttgctgcctgtgatcaaatatcatctccctcgcagagatccgaattatcagccttcttattcatttctcgcttaaccgtgacaggctgtcgatcttgagaactatgccgacataataggaaatcgctggataaagccgctgaggaagctgagtggcgctatttctttagaagtgaacgttgacgatcgtcgaccgtaccccgatgaattaattcggacgtacgttctgaacacagctggatacttacttgggcgattgtcatacatgacatcaacaatgtacccgtttgtgtaaccgtctcttggaggttcgtatgacactagtggttcccctcagcttgcgactagatgttgaggcctaacattttattagagagcaggctagttgcttagatacatgatcttcaggccgttatctgtcagggcaagcgaaaattggccatttatgacgaccaatgccccgcagaagctcccatctttgccgccatagacgccgcgccccccttttggggtgtagaacatccttttgccagatgtggaaaagaagttcgttgtcccattgttggcaatgacgtagtagccggcgaaagtgcgagacccatttgcgctatatataagcctacgatttccgttgcgactattgtcgtaattggatgaactattatcgtagttgctctcagagttgtcgtaatttgatggactattgtcgtaattgcttatggagttgtcgtagttgcttggagaaatgtcgtagttggatggggagtagtcatagggaagacgagcttcatccactaaaacaattggcaggtcagcaagtgcctgccccgatgccatcgcaagtacgaggcttagaaccaccttcaacagatcgcgcatagtcttccccagctctctaacgcttgagttaagccgcgccgcgaagcggcgtcggcttgaacgaattgttagacattatttgccgactaccttggtgatctcgcctttcacgtagtgaacaaattcttccaactgatctgcgcgcgaggccaagcgatcttcttgtccaagataagcctgcctagcttcaagtatgacgggctgatactgggccggcaggcgctccattgcccagtcggcagcgacatccttcggcgcgattttgccggttactgcgctgtaccaaatgcgggacaacgtaagcactacatttcgctcatcgccagcccagtcgggcggcgagttccatagcgttaaggtttcatttagcgcctcaaatagatcctgttcaggaaccggatcaaagagttcctccgccgctggacctaccaaggcaacgctatgttctcttgcttttgtcagcaagatagccagatcaatgtcgatcgtggctggctcgaagatacctgcaagaatgtcattgcgctgccattctccaaattgcagttcgcgcttagctggataacgccacggaatgatgtcgtcgtgcacaacaatggtgacttctacagcgcggagaatctcgctctctccaggggaagccgaagtttccaaaaggtcgttgatcaaagctcgccgcgttgtttcatcaagccttacagtcaccgtaaccagcaaatcaatatcactgtgtggcttcaggccgccatccactgcggagccgtacaaatgtacggccagcaacgtcggttcgagatggcgctcgatgacgccaactacctctgatagttgagtcgatacttcggcgatcaccgcttccctcatgatgtttaactcctgaattaagccgcgccgcgaagcggtgtcggcttgaatgaattgttaggcgtcatcctgtgctcccgagaaccagtaccagtacatcgctgtttcgttcgagacttgaggtctagttttatacgtgaacaggtcaatgccgccgagagtaaagccacattttgcgtacaaattgcaggcaggtacattgttcgtttgtgtctctaatcgtatgccaaggagctgtctgcttagtgcccactttttcgcaaattcgatgagactgtgcgcgactcctttgcctcggtgcgtgtgcgacacaacaatgtgttcgatagaggctagatcgttccatgttgagttgagttcaatcttcccgacaagctcttggtcgatgaatgcgccatagcaagcagagtcttcatcagagtcatcatccgagatgtaatccttccggtaggggctcacacttctggtagatagttcaaagccttggtcggataggtgcacatcgaacacttcacgaacaatgaaatggttctcagcatccaatgtttccgccacctgctcagggatcaccgaaatcttcatatgacgcctaacgcctggcacagcggatcgcaaacctggcgcggcttttggcacaaaaggcgtgacaggtttgcgaatccgttgctgccacttgttaacccttttgccagatttggtaactataatttatgttagaggcgaagtcttgggtaaaaactggcctaaaattgctggggatttcaggaaagtaaacatcaccttccggctcgatgtctattgtagatatatgtagtgtatctacttgatcgggggatctgctgcctcgcgcgtttcggtgatgacggtgaaaacctctgacacatgcagctcccggagacggtcacagcttgtctgtaagcggatgccgggagcagacaagcccgtcagggcgcgtcagcgggtgttggcgggtgtcggggcgcagccatgacccagtcacgtagcgatagcggagtgtatactggcttaactatgcggcatcagagcagattgtactgagagtgcaccatatgcggtgtgaaataccgcacagatgcgtaaggagaaaataccgcatcaggcgctcttccgcttcctcgctcactgactcgctgcgctcggtcgttcggctgcggcgagcggtatcagctcactcaaaggcggtaatacggttatccacagaatcaggggataacgcaggaaagaacatgtgagcaaaaggccagcaaaaggccaggaaccgtaaaaaggccgcgttgctggcgtttttccataggctccgcccccctgacgagcatcacaaaaatcgacgctcaagtcagaggtggcgaaacccgacaggactataaagataccaggcgtttccccctggaagctccctcgtgcgctctcctgttccgaccctgccgcttaccggatacctgtccgcctttctcccttcgggaagcgtggcgctttctcatagctcacgctgtaggtatctcagttcggtgtaggtcgttcgctccaagctgggctgtgtgcacgaaccccccgttcagcccgaccgctgcgccttatccggtaactatcgtcttgagtccaacccggtaagacacgacttatcgccactggcagcagccactggtaacaggattagcagagcgaggtatgtaggcggtgctacagagttcttgaagtggtggcctaactacggctacactagaaggacagtatttggtatctgcgctctgctgaagccagttaccttcggaaaaagagttggtagctcttgatccggcaaacaaaccaccgctggtagcggtggtttttttgtttgcaagcagcagattacgcgcagaaaaaaaggatctcaagaagatcctttgatcttttctacggggtctgacgctcagtggaacgaaaactcacgttaagggattttggtcatgagattatcaaaaaggatcttcacctagatccttttaaattaaaaatgaagttttaaatcaatctaaagtatatatgagtaaacttggtctgacagttaccaatgcttaatcagtgaggcacctatctcagcgatctgtctatttcgttcatccatagttgcctgactccccgtcgtgtagataactacgatacgggagggcttaccatctggccccagtgctgcaatgataccgcgagacccacgctcaccggctccagatttatcagcaataaaccagccagccggaagggccgagcgcagaagtggtcctgcaactttatccgcctccatccagtctattaattgttgccgggaagctagagtaagtagttcgccagttaatagtttgcgcaacgttgttgccattgctgcagggggggggggggggggggacttccattgttcattccacggacaaaaacagagaaaggaaacgacagaggccaaaaagcctcgctttcagcacctgtcgtttcctttcttttcagagggtattttaaataaaaacattaagttatgacgaagaagaacggaaacgccttaaaccggaaaattttcataaatagcgaaaacccgcgaggtcgccgccccgtaacctgtcggatcaccggaaaggacccgtaaagtgataatgattatcatctacatatcacaacgtgcgtggaggccatcaaaccacgtcaaataatcaattatgacgcaggtatcgtattaattgatctgcatcaacttaacgtaaaaacaacttcagacaatacaaatcagcgacactgaatacggggcaacctcatgtcccccccccccccccccctgcaggcatcgtggtgtcacgctcgtcgtttggtatggcttcattcagctccggttcccaacgatcaaggcgagttacatgatcccccatgttgtgcaaaaaagcggttagctccttcggtcctccgatcgttgtcagaagtaagttggccgcagtgttatcactcatggttatggcagcactgcataattctcttactgtcatgccatccgtaagatgcttttctgtgactggtgagtactcaaccaagtcattctgagaatagtgtatgcggcgaccgagttgctcttgcccggcgtcaacacgggataataccgcgccacatagcagaactttaaaagtgctcatcattggaaaacgttcttcggggcgaaaactctcaaggatcttaccgctgttgagatccagttcgatgtaacccactcgtgcacccaactgatcttcagcatcttttactttcaccagcgtttctgggtgagcaaaaacaggaaggcaaaatgccgcaaaaaagggaataagggcgacacggaaatgttgaatactcatactcttcctttttcaatattattgaagcatttatcagggttattgtctcatgagcggatacatatttgaatgtatttagaaaaataaacaaataggggttccgcgcacatttccccgaaaagtgccacctgacgtctaagaaaccattattatcatgacattaacctataaaaataggcgtatcacgaggccctttcgtcttcaagaattggtcgacgatcttgctgcgttcggatattttcgtggagttcccgccacagacccggattgaaggcgagatccagcaactcgcgccagatcatcctgtgacggaactttggcgcgtgatgactggccaggacgtcggccgaaagagcgacaagcagatcacgcttttcgacagcgtcggatttgcgatcgaggatttttcggcgctgcgctacgtccgcgaccgcgttgagggatcaagccacagcagcccactcgaccttctagccgacccagacgagccaagggatctttttggaatgctgctccgtcgtcaggctttccgacgtttgggtggttgaacagaagtcattatcgtacggaatgccaagcactcccgaggggaaccctgtggttggcatgcacatacaaatggacgaacggataaaccttttcacgcccttttaaatatccgttattctaataaacgctcttttctcttaggtttacccgccaatatatcctgtcaaacactgatagtttaaactgaaggcgggaaacgacaatctgatcatgagcggagaattaagggagtcacgttatgacccccgccgatgacgcgggacaagccgttttacgtttggaactgacagaaccgcaacgttgaaggagccactcagccc

SEQ ID NO: 65 - DNA, 11577 bp, artificial sequence
  vector
gtccgaagcttgcatgcctgcagtgcagcgtgacccggtcgtgcccctctctagagataatgagcattgcatgtctaagttataaaaaattaccacatattttttttgtcacacttgtttgaagtgcagtttatctatctttatacatatatttaaactttactctacgaataatataatctatagtactacaataatatcagtgttttagagaatcatataaatgaacagttagacatggtctaaaggacaattgagtattttgacaacaggactctacagttttatctttttagtgtgcatgtgttctcctttttttttgcaaatagcttcacctatataatacttcatccattttattagtacatccatttagggtttagggttaatggtttttatagactaatttttttagtacatctattttattctattttagcctctaaattaagaaaactaaaactctattttagtttttttatttaataatttagatataaaatagaataaaataaagtgactaaaaattaaacaaataccctttaagaaattaaaaaaactaaggaaacatttttcttgtttcgagtagataatgccagcctgttaaacgccgtcgacgagtctaacggacaccaaccagcgaaccagcagcgtcgcgtcgggccaagcgaagcagacggcacggcatctctgtcgctgcctctggacccctctcgagagttccgctccaccgttggacttgctccgctgtcggcatccagaaattgcgtggcggagcggcagacgtgagccggcacggcaggcggcctcctcctcctctcacggcaccggcagctacgggggattcctttcccaccgctccttcgctttcccttcctcgcccgccgtaataaatagacaccccctccacaccctctttccccaacctcgtgttgttcggagcgcacacacacacaaccagatctcccccaaatccacccgtcggcacctccgcttcaaggtacgccgctcgtcctcccccccccccctctctaccttctctagatcggcgttccggtccatgcatggttagggcccggtagttctacttctgttcatgtttgtgttagatccgtgtttgtgttagatccgtgctgctagcgttcgtacacggatgcgacctgtacgtcagacacgttctgattgctaacttgccagtgtttctctttggggaatcctgggatggctctagccgttccgcagacgggatcgatttcatgattttttttgtttcgttgcatagggtttggtttgcccttttcctttatttcaatatatgccgtgcacttgtttgtcgggtcatcttttcatgcttttttttgtcttggttgtgatgatgtggtctggttgggcggtcgttctagatcggagtagaattctgtttcaaactacctggtggatttattaattttggatctgtatgtgtgtgccatacatattcatagttacgaattgaagatgatggatggaaatatcgatctaggataggtatacatgttgatgcgggttttactgatgcatatacagagatgctttttgttcgcttggttgtgatgatgtggtgtggttgggcggtcgttcattcgttctagatcggagtagaatactgtttcaaactacctggtgtatttattaattttggaactgtatgtgtgtgtcatacatcttcatagttacgagtttaagatggatggaaatatcgatctaggataggtatacatgttgatgtgggttttactgatgcatatacatgatggcatatgcagcatctattcatatgctctaaccttgagtacctatctattataataaacaagtatgttttataattattttgatcttgatatacttggatgatggcatatgcagcagctatatgtggatttttttagccctgccttcatacgctatttatttgcttggtactgtttcttttgtcgatgctcaccctgttgtttggtgttacttctgcaggtcgactttaacttagcctaggatccacacgacaccatgtcccccgagcgccgccccgtcgagatccgcccggccaccgccgccgacatggccgccgtgtgcgacatcgtgaaccactacatcgagacctccaccgtgaacttccgcaccgagccgcagaccccgcaggagtggatcgacgacctggagcgcctccaggaccgctacccgtggctcgtggccgaggtggagggcgtggtggccggcatcgcctacgccggcccgtggaaggcccgcaacgcctacgactggaccgtggagtccaccgtgtacgtgtcccaccgccaccagcgcctcggcctcggctccaccctctacacccacctcctcaagagcatggaggcccagggcttcaagtccgtggtggccgtgatcggcctcccgaacgacccgtccgtgcgcctccacgaggccctcggctacaccgcccgcggcaccctccgcgccgccggctacaagcacggcggctggcacgacgtcggcttctggcagcgcgacttcgagctgccggccccgccgcgcccggtgcgcccggtgacgcagatctgagtcgaaacctagacttgtccatcttctggattggccaacttaattaatgtatgaaataaaaggatgcacacatagtgacatgctaatcactataatgtgggcatcaaagttgtgtgttatgtgtaattactagttatctgaataaaagagaaagagatcatccatatttcttatcctaaatgaatgtcacgtgtctttataattctttgatgaaccagatgcatttcattaaccaaatccatatacatataaatattaatcatatataattaatatcaattgggttagcaaaacaaatctagtctaggtgtgttttgcgaattgcggccgccaccgcggtggagctcgaattcattccgattaatcgtggcctcttgctcttcaggatgaagagctatgtttaaacgtgcaagcgctactagacaattcagtacattaaaaacgtccgcaatgtgttattaagttgtctaagcgtcaatttgtttacaccacaatatatcctgccaccagccagccaacagctccccgaccggcagctcggcacaaaatcaccactcgatacaggcagcccatcagtccgggacggcgtcagcgggagagccgttgtaaggcggcagactttgctcatgttaccgatgctattcggaagaacggcaactaagctgccgggtttgaaacacggatgatctcgcggagggtagcatgttgattgtaacgatgacagagcgttgctgcctgtgatcaaatatcatctccctcgcagagatccgaattatcagccttcttattcatttctcgcttaaccgtgacaggctgtcgatcttgagaactatgccgacataataggaaatcgctggataaagccgctgaggaagctgagtggcgctatttctttagaagtgaacgttgacgatcgtcgaccgtaccccgatgaattaattcggacgtacgttctgaacacagctggatacttacttgggcgattgtcatacatgacatcaacaatgtacccgtttgtgtaaccgtctcttggaggttcgtatgacactagtggttcccctcagcttgcgactagatgttgaggcctaacattttattagagagcaggctagttgcttagatacatgatcttcaggccgttatctgtcagggcaagcgaaaattggccatttatgacgaccaatgccccgcagaagctcccatctttgccgccatagacgccgcgccccccttttggggtgtagaacatccttttgccagatgtggaaaagaagttcgttgtcccattgttggcaatgacgtagtagccggcgaaagtgcgagacccatttgcgctatatataagcctacgatttccgttgcgactattgtcgtaattggatgaactattatcgtagttgctctcagagttgtcgtaatttgatggactattgtcgtaattgcttatggagttgtcgtagttgcttggagaaatgtcgtagttggatggggagtagtcatagggaagacgagcttcatccactaaaacaattggcaggtcagcaagtgcctgccccgatgccatcgcaagtacgaggcttagaaccaccttcaacagatcgcgcatagtcttccccagctctctaacgcttgagttaagccgcgccgcgaagcggcgtcggcttgaacgaattgttagacattatttgccgactaccttggtgatctcgcctttcacgtagtgaacaaattcttccaactgatctgcgcgcgaggccaagcgatcttcttgtccaagataagcctgcctagcttcaagtatgacgggctgatactgggccggcaggcgctccattgcccagtcggcagcgacatccttcggcgcgattttgccggttactgcgctgtaccaaatgcgggacaacgtaagcactacatttcgctcatcgccagcccagtcgggcggcgagttccatagcgttaaggtttcatttagcgcctcaaatagatcctgttcaggaaccggatcaaagagttcctccgccgctggacctaccaaggcaacgctatgttctcttgcttttgtcagcaagatagccagatcaatgtcgatcgtggctggctcgaagatacctgcaagaatgtcattgcgctgccattctccaaattgcagttcgcgcttagctggataacgccacggaatgatgtcgtcgtgcacaacaatggtgacttctacagcgcggagaatctcgctctctccaggggaagccgaagtttccaaaaggtcgttgatcaaagctcgccgcgttgtttcatcaagccttacagtcaccgtaaccagcaaatcaatatcactgtgtggcttcaggccgccatccactgcggagccgtacaaatgtacggccagcaacgtcggttcgagatggcgctcgatgacgccaactacctctgatagttgagtcgatacttcggcgatcaccgcttccctcatgatgtttaactcctgaattaagccgcgccgcgaagcggtgtcggcttgaatgaattgttaggcgtcatcctgtgctcccgagaaccagtaccagtacatcgctgtttcgttcgagacttgaggtctagttttatacgtgaacaggtcaatgccgccgagagtaaagccacattttgcgtacaaattgcaggcaggtacattgttcgtttgtgtctctaatcgtatgccaaggagctgtctgcttagtgcccactttttcgcaaattcgatgagactgtgcgcgactcctttgcctcggtgcgtgtgcgacacaacaatgtgttcgatagaggctagatcgttccatgttgagttgagttcaatcttcccgacaagctcttggtcgatgaatgcgccatagcaagcagagtcttcatcagagtcatcatccgagatgtaatccttccggtaggggctcacacttctggtagatagttcaaagccttggtcggataggtgcacatcgaacacttcacgaacaatgaaatggttctcagcatccaatgtttccgccacctgctcagggatcaccgaaatcttcatatgacgcctaacgcctggcacagcggatcgcaaacctggcgcggcttttggcacaaaaggcgtgacaggtttgcgaatccgttgctgccacttgttaacccttttgccagatttggtaactataatttatgttagaggcgaagtcttgggtaaaaactggcctaaaattgctggggatttcaggaaagtaaacatcaccttccggctcgatgtctattgtagatatatgtagtgtatctacttgatcgggggatctgctgcctcgcgcgtttcggtgatgacggtgaaaacctctgacacatgcagctcccggagacggtcacagcttgtctgtaagcggatgccgggagcagacaagcccgtcagggcgcgtcagcgggtgttggcgggtgtcggggcgcagccatgacccagtcacgtagcgatagcggagtgtatactggcttaactatgcggcatcagagcagattgtactgagagtgcaccatatgcggtgtgaaataccgcacagatgcgtaaggagaaaataccgcatcaggcgctcttccgcttcctcgctcactgactcgctgcgctcggtcgttcggctgcggcgagcggtatcagctcactcaaaggcggtaatacggttatccacagaatcaggggataacgcaggaaagaacatgtgagcaaaaggccagcaaaaggccaggaaccgtaaaaaggccgcgttgctggcgtttttccataggctccgcccccctgacgagcatcacaaaaatcgacgctcaagtcagaggtggcgaaacccgacaggactataaagataccaggcgtttccccctggaagctccctcgtgcgctctcctgttccgaccctgccgcttaccggatacctgtccgcctttctcccttcgggaagcgtggcgctttctcatagctcacgctgtaggtatctcagttcggtgtaggtcgttcgctccaagctgggctgtgtgcacgaaccccccgttcagcccgaccgctgcgccttatccggtaactatcgtcttgagtccaacccggtaagacacgacttatcgccactggcagcagccactggtaacaggattagcagagcgaggtatgtaggcggtgctacagagttcttgaagtggtggcctaactacggctacactagaaggacagtatttggtatctgcgctctgctgaagccagttaccttcggaaaaagagttggtagctcttgatccggcaaacaaaccaccgctggtagcggtggtttttttgtttgcaagcagcagattacgcgcagaaaaaaaggatctcaagaagatcctttgatcttttctacggggtctgacgctcagtggaacgaaaactcacgttaagggattttggtcatgagattatcaaaaaggatcttcacctagatccttttaaattaaaaatgaagttttaaatcaatctaaagtatatatgagtaaacttggtctgacagttaccaatgcttaatcagtgaggcacctatctcagcgatctgtctatttcgttcatccatagttgcctgactccccgtcgtgtagataactacgatacgggagggcttaccatctggccccagtgctgcaatgataccgcgagacccacgctcaccggctccagatttatcagcaataaaccagccagccggaagggccgagcgcagaagtggtcctgcaactttatccgcctccatccagtctattaattgttgccgggaagctagagtaagtagttcgccagttaatagtttgcgcaacgttgttgccattgctgcagggggggggggggggggggacttccattgttcattccacggacaaaaacagagaaaggaaacgacagaggccaaaaagcctcgctttcagcacctgtcgtttcctttcttttcagagggtattttaaataaaaacattaagttatgacgaagaagaacggaaacgccttaaaccggaaaattttcataaatagcgaaaacccgcgaggtcgccgccccgtaacctgtcggatcaccggaaaggacccgtaaagtgataatgattatcatctacatatcacaacgtgcgtggaggccatcaaaccacgtcaaataatcaattatgacgcaggtatcgtattaattgatctgcatcaacttaacgtaaaaacaacttcagacaatacaaatcagcgacactgaatacggggcaacctcatgtcccccccccccccccccctgcaggcatcgtggtgtcacgctcgtcgtttggtatggcttcattcagctccggttcccaacgatcaaggcgagttacatgatcccccatgttgtgcaaaaaagcggttagctccttcggtcctccgatcgttgtcagaagtaagttggccgcagtgttatcactcatggttatggcagcactgcataattctcttactgtcatgccatccgtaagatgcttttctgtgactggtgagtactcaaccaagtcattctgagaatagtgtatgcggcgaccgagttgctcttgcccggcgtcaacacgggataataccgcgccacatagcagaactttaaaagtgctcatcattggaaaacgttcttcggggcgaaaactctcaaggatcttaccgctgttgagatccagttcgatgtaacccactcgtgcacccaactgatcttcagcatcttttactttcaccagcgtttctgggtgagcaaaaacaggaaggcaaaatgccgcaaaaaagggaataagggcgacacggaaatgttgaatactcatactcttcctttttcaatattattgaagcatttatcagggttattgtctcatgagcggatacatatttgaatgtatttagaaaaataaacaaataggggttccgcgcacatttccccgaaaagtgccacctgacgtctaagaaaccattattatcatgacattaacctataaaaataggcgtatcacgaggccctttcgtcttcaagaattggtcgacgatcttgctgcgttcggatattttcgtggagttcccgccacagacccggattgaaggcgagatccagcaactcgcgccagatcatcctgtgacggaactttggcgcgtgatgactggccaggacgtcggccgaaagagcgacaagcagatcacgcttttcgacagcgtcggatttgcgatcgaggatttttcggcgctgcgctacgtccgcgaccgcgttgagggatcaagccacagcagcccactcgaccttctagccgacccagacgagccaagggatctttttggaatgctgctccgtcgtcaggctttccgacgtttgggtggttgaacagaagtcattatcgtacggaatgccaagcactcccgaggggaaccctgtggttggcatgcacatacaaatggacgaacggataaaccttttcacgcccttttaaatatccgttattctaataaacgctcttttctcttaggtttacccgccaatatatcctgtcaaacactgatagtttaaactgaaggcgggaaacgacaatctgatcatgagcggagaattaagggagtcacgttatgacccccgccgatgacgcgggacaagccgttttacgtttggaactgacagaaccgcaacgttgaaggagccactcagcaagctggtacgattgtaatacgactcactatagggcgaattgagcgctgtttaaacgctcttcaactggaagagcggttaccagagctggtcacctttgtccaccaagatggaactgcggccgctcattaattaagtcaggcgcgcctctagttgaagacacgttcatgtcttcatcgtaagaagacactcagtagtcttcggccagaatggccatctggattcagcaggcctagaaggccatttaaatcctgaggatctggtcttcctaaggacccgggatatcggaccgaagctggccgctctagaactagtggatctcgatgtgtagtctacgagaagggttaaccgtctcttcgtgagaataaccgtggcctaaaaataagccgatgaggataaataaaatgtggtggtacagtacttcaagaggtttactcatcaagaggatgcttttccgatgagctctagtagtacatcggacctcacatacctccattgtggtgaaatattttgtgctcatttagtgatgggtaaattttgtttatgtcactctaggttttgacatttcagttttgccactcttaggttttgacaaataatttccattccgcggcaaaagcaaaacaattttattttacttttaccactcttagctttcacaatgtatcacaaatgccactctagaaattctgtttatgccacagaatgtgaaaaaaaacactcacttatttgaagccaaggtgttcatggcatggaaatgtgacataaagtaacgttcgtgtataagaaaaaattgtactcctcgtaacaagagacggaaacatcatgagacaatcgcgtttggaaggctttgcatcacctttggatgatgcgcatgaatggagtcgtctgcttgctagccttcgcctaccgcccactgagtccgggcggcaactaccatcggcgaacgacccagctgacctctaccgaccggacttgaatgcgctaccttcgtcagcgacgatggccgcgtacgctggcgacgtgcccccgcatgcatggcggcacatggcgagctcagaccgtgcgtggctggctacaaatacgtaccccgtgagtgccctagctagaaacttacacctgcaactgcgagagcgagcgtgtgagtgtagccgagtagatcccccgggctgcaggtcgactctagaggatccaccggtcgccaccatggcctcctccgagaacgtcatcaccgagttcatgcgcttcaaggtgcgcatggagggcaccgtgaacggccacgagttcgagatcgagggcgagggcgagggccgcccctacgagggccacaacaccgtgaagctgaaggtgacgaagggcggccccctgcccttcgcctgggacatcctgtccccccagttccagtacggctccaaggtgtacgtgaagcaccccgccgacatccccgactacaagaagctgtccttccccgagggcttcaagtgggagcgcgtgatgaacttcgaggacggcggcgtggcgaccgtgacccaggactcctccctgcaggacggctgcttcatctacaaggtgaagttcatcggcgtgaacttcccctccgacggccccgtgatgcagaagaagaccatgggctgggaggcctccaccgagcgcctgtacccccgcgacggcgtgctgaagggcgagacccacaaggccctgaagctgaaggacggcggccactacctggtggagttcaagtccatctacatggccaagaagcccgtgcagctgcccggctactactacgtggacgccaagctggacatcacctcccacaacgaggactacaccatcgtggagcagtacgagcgcaccgagggccgccaccacctgttcctgtagcggcccatggatattcgaacgcgtaggtaccacatggttaacctagacttgtccatcttctggattggccaacttaattaatgtatgaaataaaaggatgcacacatagtgacatgctaatcactataatgtgggcatcaaagttgtgtgttatgtgtaattactagttatctgaataaaagagaaagagatcatccatatttcttatcctaaatgaatgtcacgtgtctttataattctttgatgaaccagatgcatttcattaaccaaatccatatacatataaatattaatcatatataattaatatcaattgggttagcaaaacaaatctagtctaggtgtgttttgcgaatgcggccgccaccgcggtggagctcgaattccg

SEQ ID NO: 66 - DNA, 12283 bp, artificial sequence
  vector
cacatacaaatggacgaacggataaaccttttcacgcccttttaaatatccgttattctaataaacgctcttttctcttaggtttacccgccaatatatcctgtcaaacactgatagtttaaactgaaggcgggaaacgacaatctgatcatgagcggagaattaagggagtcacgttatgacccccgccgatgacgcgggacaagccgttttacgtttggaactgacagaaccgcaacgttgaaggagccactcagcaagctggtacgattgtaatacgactcactatagggcgaattgagcgctgtttaaacgctcttcaactggaagagcggttactaccggctggatggcggggccttgatcgtgcaccgccggcgtccggataagtgactagggtcacgtgaccctagtcacttatcgagctagttaccctatgaggtgacatgaagcgctcacggttactatgacggttagcttcacgactgttggtggcagtagcgtacgacttagctatagttccggtagatctgaagttcctattccgaagttcctattcttcaaaaggtataggaacttcctcgaattgttgtggtggggtatagaggtttgatataggtggaactgctgtagagcgtggagatatagggggaaagagaacgctgatgtgacaagtgagtgagatatagggggagaaatttagggggaacgccgaacacagtctaaagaagcttgggacccaaagcactctgttcgggggtttttttttttgtctttcaactttttgctgtaatgttattcaaaataagaaaagcacttggcatggctaagaaatagagttcaacaactgaacagtacagtgtattatcaatggcataaaaaacaacccttacagcattgccgtattttattgatcaaacattcaactcaacactgacgagtggtcttccaccgatcaacggactaatgctgctttgtcagatcaccggttaagtgactagggtcacgtgaccctagtcacttaggttaccagagctggtcacctttgtccaccaagatggaactgcggccgctcattaattaagtcaggcgcgcctctagttgaagacacgttcatgtcttcatcgtaagaagacactcagtagtcttcggccagaatggccatctggattcagcaggcctagaaggccatttaaatcctgaggatctggtcttcctaaggacccgggatatcgctatcaactttgtatagaaaagttgaacgagaaacgtaaaatgatataaatatcaatatattaaattagattttgcataaaaaacagactacataatactgtaaaacacaacatatccagtcactatggtcgacctgcagactggctgtgtataagggagcctgacatttatattccccagaacatcaggttaatggcgtttttgatgtcattttcgcggtggctgagatcagccacttcttccccgataacggagaccggcacactggccatatcggtggtcatcatgcgccagctttcatccccgatatgcaccaccgggtaaagttcacgggggactttatctgacagcagacgtgcactggccagggggatcaccatccgtcgcccgggcgtgtcaataatatcactctgtacatccacaaacagacgataacggctctctcttttataggtgtaaaccttaaactgcatttcaccagcccctgttctcgtcggcaaaagagccgttcatttcaataaaccgggcgacctcagccatcccttcctgattttccgctttccagcgttcggcacgcagacgacgggcttcattctgcatggttgtgcttaccgaaccggagatattgacatcatatatgccttgagcaactgatagctgtcgctgtcaactgtcactgtaatacgctgcttcatagcatacctctttttgacatacttcgggtatacatatcagtatatattcttataccgcaaaaatcagcgcgcaaatacgcatactgttatctggcttttagtaagccggatcctctagattacgccccgcctgccactcatcgcagtactgttgtaattcattaagcattctgccgacatggaagccatcacaaacggcatgatgaacctgaatcgccagcggcatcagcaccttgtcgccttgcgtataatatttgcccatggtgaaaacgggggcgaagaagttgtccatattggccacgtttaaatcaaaactggtgaaactcacccagggattggctgagacgaaaaacatattctcaataaaccctttagggaaataggccaggttttcaccgtaacacgccacatcttgcgaatatatgtgtagaaactgccggaaatcgtcgtggtattcactccagagcgatgaaaacgtttcagtttgctcatggaaaacggtgtaacaagggtgaacactatcccatatcaccagctcaccgtctttcattgccatacggaattccggatgagcattcatcaggcgggcaagaatgtgaataaaggccggataaaacttgtgcttatttttctttacggtctttaaaaaggccgtaatatccagctgaacggtctggttataggtacattgagcaactgactgaaatgcctcaaaatgttctttacgatgccattgggatatatcaacggtggtatatccagtgatttttttctccattttagcttccttagctcctgaaaatctcgacggatcctaactcaaaatccacacattatacgagccggaagcataaagtgtaaagcctggggtgccctaatgcggccgccatagtgactggatatgttgtgttttacagtattatgtagtctgttttttatgcaaaatctaatttaatatattgatatttatatcattttacgtttctcgttcaactttattatacaaagttgatagatatcggaccgattaaactttaattcggtccgatgcatgtatacgaagttcctattccgaagttcctattctacatagagtataggaacttcacctggtggcgccgctagtggatcccccgggctgcagtgcagcgtgacccggtcgtgcccctctctagagataatgagcattgcatgtctaagttataaaaaattaccacatattttttttgtcacacttgtttgaagtgcagtttatctatctttatacatatatttaaactttactctacgaataatataatctatagtactacaataatatcagtgttttagagaatcatataaatgaacagttagacatggtctaaaggacaattgagtattttgacaacaggactctacagttttatctttttagtgtgcatgtgttctcctttttttttgcaaatagcttcacctatataatacttcatccattttattagtacatccatttagggtttagggttaatggtttttatagactaatttttttagtacatctattttattctattttagcctctaaattaagaaaactaaaactctattttagtttttttatttaataatttagatataaaatagaataaaataaagtgactaaaaattaaacaaataccctttaagaaattaaaaaaactaaggaaacatttttcttgtttcgagtagataatgccagcctgttaaacgccgtcgacgagtctaacggacaccaaccagcgaaccagcagcgtcgcgtcgggccaagcgaagcagacggcacggcatctctgtcgctgcctctggacccctctcgagagttccgctccaccgttggacttgctccgctgtcggcatccagaaattgcgtggcggagcggcagacgtgagccggcacggcaggcggcctcctcctcctctcacggcaccggcagctacgggggattcctttcccaccgctccttcgctttcccttcctcgcccgccgtaataaatagacaccccctccacaccctctttccccaacctcgtgttgttcggagcgcacacacacacaaccagatctcccccaaatccacccgtcggcacctccgcttcaaggtacgccgctcgtcctcccccccccccctctctaccttctctagatcggcgttccggtccatgcatggttagggcccggtagttctacttctgttcatgtttgtgttagatccgtgtttgtgttagatccgtgctgctagcgttcgtacacggatgcgacctgtacgtcagacacgttctgattgctaacttgccagtgtttctctttggggaatcctgggatggctctagccgttccgcagacgggatcgatttcatgattttttttgtttcgttgcatagggtttggtttgcccttttcctttatttcaatatatgccgtgcacttgtttgtcgggtcatcttttcatgcttttttttgtcttggttgtgatgatgtggtctggttgggcggtcgttctagatcggagtagaattctgtttcaaactacctggtggatttattaattttggatctgtatgtgtgtgccatacatattcatagttacgaattgaagatgatggatggaaatatcgatctaggataggtatacatgttgatgcgggttttactgatgcatatacagagatgctttttgttcgcttggttgtgatgatgtggtgtggttgggcggtcgttcattcgttctagatcggagtagaatactgtttcaaactacctggtgtatttattaattttggaactgtatgtgtgtgtcatacatcttcatagttacgagtttaagatggatggaaatatcgatctaggataggtatacatgttgatgtgggttttactgatgcatatacatgatggcatatgcagcatctattcatatgctctaaccttgagtacctatctattataataaacaagtatgttttataattattttgatcttgatatacttggatgatggcatatgcagcagctatatgtggatttttttagccctgccttcatacgctatttatttgcttggtactgtttcttttgtcgatgctcaccctgttgtttggtgttacttctgcaggtcgactttaacttagcctaggatccacacgacaccatgtcccccgagcgccgccccgtcgagatccgcccggccaccgccgccgacatggccgccgtgtgcgacatcgtgaaccactacatcgagacctccaccgtgaacttccgcaccgagccgcagaccccgcaggagtggatcgacgacctggagcgcctccaggaccgctacccgtggctcgtggccgaggtggagggcgtggtggccggcatcgcctacgccggcccgtggaaggcccgcaacgcctacgactggaccgtggagtccaccgtgtacgtgtcccaccgccaccagcgcctcggcctcggctccaccctctacacccacctcctcaagagcatggaggcccagggcttcaagtccgtggtggccgtgatcggcctcccgaacgacccgtccgtgcgcctccacgaggccctcggctacaccgcccgcggcaccctccgcgccgccggctacaagcacggcggctggcacgacgtcggcttctggcagcgcgacttcgagctgccggccccgccgcgcccggtgcgcccggtgacgcagatctgagtcgaaacctagacttgtccatcttctggattggccaacttaattaatgtatgaaataaaaggatgcacacatagtgacatgctaatcactataatgtgggcatcaaagttgtgtgttatgtgtaattactagttatctgaataaaagagaaagagatcatccatatttcttatcctaaatgaatgtcacgtgtctttataattctttgatgaaccagatgcatttcattaaccaaatccatatacatataaatattaatcatatataattaatatcaattgggttagcaaaacaaatctagtctaggtgtgttttgcgaattgcggccgctctagcgtatacgaagttcctattccgaagttcctattctctagaaagtataggaacttctgattccgatgacttcgtaggttcctagctcaagccgctcgtgtccaagcgtcacttacgattagctaatgattacggcatctaggaccgactagtaagtgactagggtcacgtgaccctagtcacttatacgtagaattaattcattccgattaatcgtggcctcttgctcttcaggatgaagagctatgtttaaacgtgcaagcgctactagacaattcagtacattaaaaacgtccgcaatgtgttattaagttgtctaagcgtcaatttgtttacaccacaatatatcctgccaccagccagccaacagctccccgaccggcagctcggcacaaaatcaccactcgatacaggcagcccatcagtccgggacggcgtcagcgggagagccgttgtaaggcggcagactttgctcatgttaccgatgctattcggaagaacggcaactaagctgccgggtttgaaacacggatgatctcgcggagggtagcatgttgattgtaacgatgacagagcgttgctgcctgtgatcaaatatcatctccctcgcagagatccgaattatcagccttcttattcatttctcgcttaaccgtgacaggctgtcgatcttgagaactatgccgacataataggaaatcgctggataaagccgctgaggaagctgagtggcgctatttctttagaagtgaacgttgacgatcgtcgaccgtaccccgatgaattaattcggacgtacgttctgaacacagctggatacttacttgggcgattgtcatacatgacatcaacaatgtacccgtttgtgtaaccgtctcttggaggttcgtatgacactagtggttcccctcagcttgcgactagatgttgaggcctaacattttattagagagcaggctagttgcttagatacatgatcttcaggccgttatctgtcagggcaagcgaaaattggccatttatgacgaccaatgccccgcagaagctcccatctttgccgccatagacgccgcgccccccttttggggtgtagaacatccttttgccagatgtggaaaagaagttcgttgtcccattgttggcaatgacgtagtagccggcgaaagtgcgagacccatttgcgctatatataagcctacgatttccgttgcgactattgtcgtaattggatgaactattatcgtagttgctctcagagttgtcgtaatttgatggactattgtcgtaattgcttatggagttgtcgtagttgcttggagaaatgtcgtagttggatggggagtagtcatagggaagacgagcttcatccactaaaacaattggcaggtcagcaagtgcctgccccgatgccatcgcaagtacgaggcttagaaccaccttcaacagatcgcgcatagtcttccccagctctctaacgcttgagttaagccgcgccgcgaagcggcgtcggcttgaacgaattgttagacattatttgccgactaccttggtgatctcgcctttcacgtagtgaacaaattcttccaactgatctgcgcgcgaggccaagcgatcttcttgtccaagataagcctgcctagcttcaagtatgacgggctgatactgggccggcaggcgctccattgcccagtcggcagcgacatccttcggcgcgattttgccggttactgcgctgtaccaaatgcgggacaacgtaagcactacatttcgctcatcgccagcccagtcgggcggcgagttccatagcgttaaggtttcatttagcgcctcaaatagatcctgttcaggaaccggatcaaagagttcctccgccgctggacctaccaaggcaacgctatgttctcttgcttttgtcagcaagatagccagatcaatgtcgatcgtggctggctcgaagatacctgcaagaatgtcattgcgctgccattctccaaattgcagttcgcgcttagctggataacgccacggaatgatgtcgtcgtgcacaacaatggtgacttctacagcgcggagaatctcgctctctccaggggaagccgaagtttccaaaaggtcgttgatcaaagctcgccgcgttgtttcatcaagccttacagtcaccgtaaccagcaaatcaatatcactgtgtggcttcaggccgccatccactgcggagccgtacaaatgtacggccagcaacgtcggttcgagatggcgctcgatgacgccaactacctctgatagttgagtcgatacttcggcgatcaccgcttccctcatgatgtttaactcctgaattaagccgcgccgcgaagcggtgtcggcttgaatgaattgttaggcgtcatcctgtgctcccgagaaccagtaccagtacatcgctgtttcgttcgagacttgaggtctagttttatacgtgaacaggtcaatgccgccgagagtaaagccacattttgcgtacaaattgcaggcaggtacattgttcgtttgtgtctctaatcgtatgccaaggagctgtctgcttagtgcccactttttcgcaaattcgatgagactgtgcgcgactcctttgcctcggtgcgtgtgcgacacaacaatgtgttcgatagaggctagatcgttccatgttgagttgagttcaatcttcccgacaagctcttggtcgatgaatgcgccatagcaagcagagtcttcatcagagtcatcatccgagatgtaatccttccggtaggggctcacacttctggtagatagttcaaagccttggtcggataggtgcacatcgaacacttcacgaacaatgaaatggttctcagcatccaatgtttccgccacctgctcagggatcaccgaaatcttcatatgacgcctaacgcctggcacagcggatcgcaaacctggcgcggcttttggcacaaaaggcgtgacaggtttgcgaatccgttgctgccacttgttaacccttttgccagatttggtaactataatttatgttagaggcgaagtcttgggtaaaaactggcctaaaattgctggggatttcaggaaagtaaacatcaccttccggctcgatgtctattgtagatatatgtagtgtatctacttgatcgggggatctgctgcctcgcgcgtttcggtgatgacggtgaaaacctctgacacatgcagctcccggagacggtcacagcttgtctgtaagcggatgccgggagcagacaagcccgtcagggcgcgtcagcgggtgttggcgggtgtcggggcgcagccatgacccagtcacgtagcgatagcggagtgtatactggcttaactatgcggcatcagagcagattgtactgagagtgcaccatatgcggtgtgaaataccgcacagatgcgtaaggagaaaataccgcatcaggcgctcttccgcttcctcgctcactgactcgctgcgctcggtcgttcggctgcggcgagcggtatcagctcactcaaaggcggtaatacggttatccacagaatcaggggataacgcaggaaagaacatgtgagcaaaaggccagcaaaaggccaggaaccgtaaaaaggccgcgttgctggcgtttttccataggctccgcccccctgacgagcatcacaaaaatcgacgctcaagtcagaggtggcgaaacccgacaggactataaagataccaggcgtttccccctggaagctccctcgtgcgctctcctgttccgaccctgccgcttaccggatacctgtccgcctttctcccttcgggaagcgtggcgctttctcatagctcacgctgtaggtatctcagttcggtgtaggtcgttcgctccaagctgggctgtgtgcacgaaccccccgttcagcccgaccgctgcgccttatccggtaactatcgtcttgagtccaacccggtaagacacgacttatcgccactggcagcagccactggtaacaggattagcagagcgaggtatgtaggcggtgctacagagttcttgaagtggtggcctaactacggctacactagaaggacagtatttggtatctgcgctctgctgaagccagttaccttcggaaaaagagttggtagctcttgatccggcaaacaaaccaccgctggtagcggtggtttttttgtttgcaagcagcagattacgcgcagaaaaaaaggatctcaagaagatcctttgatcttttctacggggtctgacgctcagtggaacgaaaactcacgttaagggattttggtcatgagattatcaaaaaggatcttcacctagatccttttaaattaaaaatgaagttttaaatcaatctaaagtatatatgagtaaacttggtctgacagttaccaatgcttaatcagtgaggcacctatctcagcgatctgtctatttcgttcatccatagttgcctgactccccgtcgtgtagataactacgatacgggagggcttaccatctggccccagtgctgcaatgataccgcgagacccacgctcaccggctccagatttatcagcaataaaccagccagccggaagggccgagcgcagaagtggtcctgcaactttatccgcctccatccagtctattaattgttgccgggaagctagagtaagtagttcgccagttaatagtttgcgcaacgttgttgccattgctgcagggggggggggggggggggacttccattgttcattccacggacaaaaacagagaaaggaaacgacagaggccaaaaagcctcgctttcagcacctgtcgtttcctttcttttcagagggtattttaaataaaaacattaagttatgacgaagaagaacggaaacgccttaaaccggaaaattttcataaatagcgaaaacccgcgaggtcgccgccccgtaacctgtcggatcaccggaaaggacccgtaaagtgataatgattatcatctacatatcacaacgtgcgtggaggccatcaaaccacgtcaaataatcaattatgacgcaggtatcgtattaattgatctgcatcaacttaacgtaaaaacaacttcagacaatacaaatcagcgacactgaatacggggcaacctcatgtcccccccccccccccccctgcaggcatcgtggtgtcacgctcgtcgtttggtatggcttcattcagctccggttcccaacgatcaaggcgagttacatgatcccccatgttgtgcaaaaaagcggttagctccttcggtcctccgatcgttgtcagaagtaagttggccgcagtgttatcactcatggttatggcagcactgcataattctcttactgtcatgccatccgtaagatgcttttctgtgactggtgagtactcaaccaagtcattctgagaatagtgtatgcggcgaccgagttgctcttgcccggcgtcaacacgggataataccgcgccacatagcagaactttaaaagtgctcatcattggaaaacgttcttcggggcgaaaactctcaaggatcttaccgctgttgagatccagttcgatgtaacccactcgtgcacccaactgatcttcagcatcttttactttcaccagcgtttctgggtgagcaaaaacaggaaggcaaaatgccgcaaaaaagggaataagggcgacacggaaatgttgaatactcatactcttcctttttcaatattattgaagcatttatcagggttattgtctcatgagcggatacatatttgaatgtatttagaaaaataaacaaataggggttccgcgcacatttccccgaaaagtgccacctgacgtctaagaaaccattattatcatgacattaacctataaaaataggcgtatcacgaggccctttcgtcttcaagaattggtcgacgatcttgctgcgttcggatattttcgtggagttcccgccacagacccggattgaaggcgagatccagcaactcgcgccagatcatcctgtgacggaactttggcgcgtgatgactggccaggacgtcggccgaaagagcgacaagcagatcacgcttttcgacagcgtcggatttgcgatcgaggatttttcggcgctgcgctacgtccgcgaccgcgttgagggatcaagccacagcagcccactcgaccttctagccgacccagacgagccaagggatctttttggaatgctgctccgtcgtcaggctttccgacgtttgggtggttgaacagaagtcattatcgtacggaatgccaagcactcccgaggggaaccctgtggttggcatg

SEQ ID NO: 67 - DNA, 2227 bp, resurrection grass 38031
cacggccctaacgcagagaatacatatatatataaacaatctaccactcttcatagctgaataccatggcctgtttctcgccctgtcaatggcaatccatctcctccaacaccatggttgcgtccatggttctgaaacttctcttcctttttctcaacctagcagccttcactgccggtgacaagcaattcgtctactccggcttctccgatgctaaacttgtcaccgatggtgctaccacagtcacatcaaatggcctccttgagctcaccaatggaacagaccaacagaaaggccatgccttctaccaaactccgctaagctttaagagttcgcccaatggaattgtgcagtccttctccacctccttcgtgttcgccatactgtcagtatacactgacctaagtgcccacggtatggccttcgttgtggcaccaagcataaacttcccatcaagtgcattgcctgggcagttcctgggccttacggacatcaagaacaacgagaacagcagcaaccacttcctagcagtcgagctggacactatccagaacaaggagttcaatgacctcaatgccaaccatgccggcgtcaacatcaatggcctcaaatcgttgaaatccttctacgctggctactatgctgaagacggtaattttcataacttgagtctgattagtcgtgaggctatgcaagtgtggatagactatgacgacaaggtcgcaagcatcacagttaccatggcatctctgaaggttgcaaggcctatgaagcctctgttcacagctacctacaatctcacaacagtgatttcagatgttgcttatattggcttctcctctgctactgggacaatcaatacacggcattatgtgcttggctggagcttcaacatgagtggttctgctgcggctattgacattggcaagctacccaaccttccacgtgttggtccaaagcctcgatccaaggtattggaaattgttttgccagtggtaactgctgtgtttgtgctcgtcgtgggcacccttattttactactcatccgaaggcatttaagatatactgagctgcgggaagattgggaggtcgaatttggtccacatcgattctcatacaaggatttgtttgacgcaacagaaggattcaaggacaaacacttgctaggcattggaggatttggaagggtatataagggcatccttccaatgtctaaattggaggttgctgtaaaaagggtgtctcatgattcaaaacagggcatcaaggaattcattgcggaggttgctagcataggccgcatccaacatcgcaatctcgtcagagtacttggttattgcagaagaagaagcgagttatttttggtgtacgaatatatgccaaatggaagtgttgacaagtacttgtatggtaaagagggcaagcctaccctgaactggtcaaacaggtggcgtattatcaatggcattgcctcttgcctgctttatcttcatgaagagtgggaaaaagttgtcatccatcgagatattaaaccaagtaatgtccttcttgatagcgacatgaatggacgacttggtgactttggccttgctaggttatatgatcacgacgctgacccgcaaaccacacatgtggttggaacaatcggctacctagctccagagctaggacacaccagcaaggcaacaccacatacagatgtatttgcttttggcatttttcttcttgagatgacatgtgggcgaagacctatcaatgaaaacatacaagaaagtcagtgcatgttggcggactgggtgcttgagcagtggaataagggatcactcatagacacagtggacaccaggctccagggaaattataatgttagtgaggtacgtttggccctaaaactaggactgctgtgctcgcatccattctccaatacacggcccacaatgcggcatgtcatgcaataccttgatggtgttatgccattaccagagatgtcgcctgcagatccaaggtttcacataatggctgtaatgcagaatgtaggatttgacgactacatcacaggttccacgctgagcaccgggacaccatctattatttgaggcggaagatgaggtattctcagttgctatctgccaccttcagtacacaacatatattttaatttcctagaataagatgttacagttgaagatgaagcgttccaaatatatagtttgtatgaggatcctac

SEQ ID NO: 68 - protein, 676 aa, resurrection grass 38031
MACFSPCQWQSISSNTMVASMVLKLLFLFLNLAAFTAGDKQFVYSGFSDAKLVTDGATTVTSNGLLELTNGTDQQKGHAFYQTPLSFKSSPNGIVQSFSTSFVFAILSVYTDLSAHGMAFVVAPSINFPSSALPGQFLGLTDIKNNENSSNHFLAVELDTIQNKEFNDLNANHAGVNINGLKSLKSFYAGYYAEDGNFHNLSLISREAMQVWIDYDDKVASITVTMASLKVARPMKPLFTATYNLTTVISDVAYIGFSSATGTINTRHYVLGWSFNMSGSAAAIDIGKLPNLPRVGPKPRSKVLEIVLPVVTAVFVLVVGTLILLLIRRHLRYTELREDWEVEFGPHRFSYKDLFDATEGFKDKHLLGIGGFGRVYKGILPMSKLEVAVKRVSHDSKQGIKEFIAEVASIGRIQHRNLVRVLGYCRRRSELFLVYEYMPNGSVDKYLYGKEGKPTLNWSNRWRIINGIASCLLYLHEEWEKVVIHRDIKPSNVLLDSDMNGRLGDFGLARLYDHDADPQTTHVVGTIGYLAPELGHTSKATPHTDVFAFGIFLLEMTCGRRPINENIQESQCMLADWVLEQWNKGSLIDTVDTRLQGNYNVSEVRLALKLGLLCSHPFSNTRPTMRHVMQYLDGVMPLPEMSPADPRFHIMAVMQNVGFDDYITGSTLSTGTPSII

SEQ ID NO: 69 - DNA, 2113 bp, resurrection grass 175180
ccggcagtaacctcaacctcgacggagctgccgctattacaccagacggcgtccttcagctcacaaaccgcacggttaccattaaaggccatgcgttctatccaactccatggcgtttccgcaggtcccccggtgaggctgtgcagtccttctcagttgcctttgtcttcggcatggttcctatctaccctggtatatgcaccgacggcatggctttcttgatctctccgaccaaggacttgtcaggtgcacagacctcacaatacttgggcctcctcaacaaaacaagtgatcgcaattcaagtaaccacatatttgcagtcgagctagatactagccaaaacaccgagttcaacgacatcgacgacaaccacatcggcatcgacatcaacagtctcacctcatctcagtctcggtcagctggcttctacgatgacagcaagaatggtatgttcagtaacttgtcccttattagtagtggagagatgcaggtgtgggtggattacaatggagagaccacacagatcaacgtgaccatggctcccctcaaggcagccaaaccgtccaggcctctgctttcagctacctacaacctctcaacagtgttggaagatacatcctacatcggcttctctgcatcaactggtccaatctattcattgtattgcgtgctcggctggagcttcagcttaggcatcaatagcccagctccacaaatcgatatcgccaagttgccaaagctacctcatgttggcccgaaacctcggtccaaggtgctcaagatcaccctaccaatagccacagccatatttatcctcatcgctggaacaacgatcattctatttgtgcgtaggcgaatgaagtatgctgagataaaagaagattgggaagatgagtttggaccacatcggttttcatacaaggatttgttccatgctacagatggcttcagaaacaataatctacttggcctaggaggatttgggaaggtgtataaaggtgtccttcctgtctccaaattagagattgctgttaagagggtgtcacatgaatcaaagcaaggaatgaaggagtttattgcagagattgtcagtattggccgtctccgtcatcgcaacctggtccagctacttggttattgcagaagaaaaggtgaactcctattggtatatgactatatgtcaaatggaagtcttgataagtatttacattgtggggagggcaaacccactctggattgggcccaaaggtttcaaatcatcaaagatgttgcatctggcctattctacctccatgagaggtgtgagaaagttgtaatccaccgagacgtcaaagcaagcaatgtgctacttgacggtgagatgaatggacgtctaggtgactttggtcttgcaaggttgtatgatcatggcagcgacccacaaactacacatgtagttggtaccattggatatcttgccccagaactggcaggcactggtaaggcgacacctatgacagatgtgtatgcctttggtatttttattcttgaggtaatctgtgggcaaaggcctatcagtagtcttgcagatgatagttcgcagatccttattgattgggtagtcgagcattggcacaaaggatcacttacatacacacttgaccacaggttacaaggcaactgcaacgcagatgaggtacacctggtattaaatctagcattgttgtgtgcacacccagtttgcaatgcaaggccgagtatgaggcaagtcacacaatacctgaatagagagatgccactcccggaaatggtgcccacaaacttgagttatagcgtgttgggcctgatgcaaaatgaaggttttgaccagtatatatccacagttagcagcagtggcatcacctccagcttcttgagtggaaggtgagaatagatagatagcaaccccagggatagatcatcttgtaattaggatgccttattaaactacttgttgatcagcatgtgctattacacagtccgacaattttaagtctatgaattagatgttgaagacggtgatttctttgtcaaatttgaattatgcaatggtgaaaagactttaaatggattttgttactgtttatgggggcc

SEQ ID NO: 70 - protein, 634 aa, resurrection grass 175180
GSNLNLDGAAAITPDGVLQLTNRTVTIKGHAFYPTPWRFRRSPGEAVQSFSVAFVFGMVPIYPGICTDGMAFLISPTKDLSGAQTSQYLGLLNKTSDRNSSNHIFAVELDTSQNTEFNDIDDNHIGIDINSLTSSQSRSAGFYDDSKNGMFSNLSLISSGEMQVWVDYNGETTQINVTMAPLKAAKPSRPLLSATYNLSTVLEDTSYIGFSASTGPIYSLYCVLGWSFSLGINSPAPQIDIAKLPKLPHVGPKPRSKVLKITLPIATAIFILIAGTTIILFVRRRMKYAEIKEDWEDEFGPHRFSYKDLFHATDGFRNNNLLGLGGFGKVYKGVLPVSKLEIAVKRVSHESKQGMKEFIAEIVSIGRLRHRNLVQLLGYCRRKGELLLVYDYMSNGSLDKYLHCGEGKPTLDWAQRFQIIKDVASGLFYLHERCEKVVIHRDVKASNVLLDGEMNGRLGDFGLARLYDHGSDPQTTHVVGTIGYLAPELAGTGKATPMTDVYAFGIFILEVICGQRPISSLADDSSQILIDWVVEHWHKGSLTYTLDHRLQGNCNADEVHLVLNLALLCAHPVCNARPSMRQVTQYLNREMPLPEMVPTNLSYSVLGLMQNEGFDQYISTVSSSGITSSFLSGR

SEQ ID NO: 71 - protein, 676 aa, Sorghum bicolor; identical to SEQ ID NO: 68

SEQ ID NO: 72 - protein, 668 aa, Sorghum bicolor
MEHLSLLLFSLALNLVSSTTVVTGQDQFVFSGFSGSNLNLDGAAAITPDGVLQLTNRTVTIKGHAFYPTPWRFRRSPGEAVQSFSVAFVFGMVPIYPGICTDGMAFLISPTKDLSGAQTSQYLGLLNKTSDRNSSNHIFAVELDTSQNTEFNDIDDNHIGIDINSLTSSQSRSAGFYDDSKNGMFSNLSLISSGEMQVWVDYNGETTQINVTMAPLKAAKPSRPLLSATYNLSTVLEDTSYIGFSASTGPIYSLYCVLGWSFSLGINSPAPQIDIAKLPKLPHVGPKPRSKVLKITLPIATAIFILIAGTTIILFVRRRMKYAEIKEDWEDEFGPHRFSYKDLFHATDGFRNNNLLGLGGFGKVYKGVLPVSKLEIAVKRVSHESKQGMKEFIAEIVSIGRLRHRNLVQLLGYCRRKGELLLVYDYMSNGSLDKYLHCGEGKPTLDWAQRFQIIKDVASGLFYLHERCEKVVIHRDVKASNVLLDGEMNGRLGDFGLARLYDHGSDPQTTHVVGTIGYLAPELAGTGKATPMTDVYAFGIFILEVICGQRPISSLADDSSQILIDWVVEHWHKGSLTYTLDHRLQGNCNADEVHLVLNLALLCAHPVCNARPSMRQVTQYLNREMPLPEMVPTNLSYSVLGLMQNEGFDQYISTVSSSGITSSFLSGR

What is claimed is:

1. A plant comprising in its genome a recombinant DNA construct comprising a polynucleotide operably linked to at least one regulatory element, wherein said polynucleotide encodes a polypeptide having an amino acid sequence of at least 50% sequence identity, based on the Clustal V method of alignment, when compared to SEQ ID NO: 27, 29, 35, 37, 39, 41, 43, 46, 47, 48, 49, 50, 51, 52, 53, 54, 55, 56, 57, 58, 59, 68 or 70, and wherein said plant exhibits altered root architecture when compared to a control plant not comprising said recombinant DNA construct.

2. A plant comprising in its genome a recombinant DNA construct comprising a polynucleotide operably linked to at least one regulatory element, wherein said polynucleotide encodes a polypeptide having an amino acid sequence of at least 50% sequence identity, based on the Clustal V method of alignment, when compared to SEQ ID NO: 27, 29, 35, 37, 39, 41, 43, 46, 47, 48, 49, 50, 51, 52, 53, 54, 55, 56, 57, 58, 59, 68 or 70, and wherein said plant exhibits an alteration in yield, biomass, root lodging or root architecture, or any combination thereof when compared to a control plant not comprising said recombinant DNA construct.

3. The plant of claim 2, wherein the plant exhibits said alteration in yield, biomass, root lodging or root architecture, or any combination thereof, when compared, under varying environmental condition to a control plant not comprising said recombinant DNA construct and wherein said environmental condition is at least one selected from drought, nitrogen, soil type, insect and disease.

4. The plant of any one of claims 1 to 3, wherein said plant is selected from the group consisting of: maize, soybean, sunflower, sorghum, canola, wheat, alfalfa, cotton, rice barley, millet, sugar cane and switchgrass.

5. Seed of the plant of any one of claims 1 to 4, wherein said seed comprises in its genome a recombinant DNA construct comprising a polynucleotide operably linked to at least one regulatory element, wherein said polynucleotide encodes a polypeptide having an amino acid sequence of at least 50% sequence identity, based on the Clustal V method of alignment, when compared to SEQ ID NO: 27, 29, 35, 37, 39, 41, 43, 46, 47, 48, 49, 50, 51, 52, 53, 54, 55, 56, 57, 58, 59, 68 or 70, and wherein a plant produced from said seed exhibits an alteration in at least one trait selected from the group consisting of: root architecture, root lodging, yield and biomass, when compared to a control plant not comprising said recombinant construct.

6. A method of altering root architecture in a plant, comprising:
(a) introducing into a regenerable plant cell a recombinant DNA construct comprising a polynucleotide operably linked to at least one regulatory sequence, wherein the polynucleotide encodes a polypeptide having an amino acid sequence of at least 50% sequence identity, based on the Clustal V method of alignment, when compared to SEQ ID NO: 27, 29, 35, 37, 39, 41, 43, 46, 47, 48, 49, 50, 51, 52, 53, 54, 55, 56, 57, 58, 59, 68 or 70;
(b) regenerating a transgenic plant from the regenerable plant cell after step (a), wherein the transgenic plant comprises in its genome the recombinant DNA construct; and
(c) obtaining a progeny plant derived from the transgenic plant of step (b), wherein said progeny plant comprises in its genome the recombinant DNA construct and exhibits an alteration in root architecture when compared to a control plant not comprising the recombinant DNA construct.

7. A method of evaluating alteration in root architecture in a plant, comprising:
(a) obtaining a transgenic plant, wherein the transgenic plant comprises in its genome a recombinant DNA construct comprising a polynucleotide operably linked to at least one regulatory element, wherein said polynucleotide encodes a polypeptide having an amino acid sequence of at least 50% sequence identity, based on the Clustal V method of alignment, when compared to SEQ ID NO: 27, 29, 35, 37, 39, 41, 43, 46, 47, 48, 49, 50, 51, 52, 53, 54, 55, 56, 57, 58, 59, 68 or 70;
(b) obtaining a progeny plant derived from the transgenic plant, wherein the progeny plant comprises in its genome the recombinant DNA construct; and
(c) evaluating the progeny plant for alteration in root architecture compared to a control plant not comprising the recombinant DNA construct.

8. A method of determining an alteration of yield, biomass or root architecture, or a combination thereof in a plant, comprising:
(a) obtaining a transgenic plant, wherein the transgenic plant comprises in its genome a recombinant DNA construct comprising a polynucleotide operably linked to at least one regulatory element, wherein said polynucleotide encodes a polypeptide having an amino acid sequence of at least 50% sequence identity, based on the Clustal V method of alignment, when compared to SEQ ID NO: 27, 29, 35, 37, 39, 41, 43, 46, 47, 48, 49, 50, 51, 52, 53, 54, 55, 56, 57, 58, 59, 68 or 70;
(b) obtaining a progeny plant derived from the transgenic plant, wherein the progeny plant comprises in its genome the recombinant DNA construct; and
(c) determining whether the progeny plant exhibits an alteration of yield, biomass, or root architecture or a combination thereof when compared to a control plant not comprising the recombinant DNA construct.

9. The method of claim 8, wherein said determining step © comprises determining whether the transgenic exhibits an alteration of yield, biomass or root architecture or a combination thereof when compared, under varying environmental condition, wherein the varying environmental condition is at least one selected from drought, nitrogen, soil type, insect or disease., to a control plant not comprising the recombinant DNA construct.

10. The method of claim 8 or 9, wherein said alteration in biomass or yield is an increase.

11. The method of any one of claims 6 to 10, wherein said plant is selected from the group consisting of: maize, soybean, sunflower, sorghum, canola, wheat, alfalfa, cotton, rice, barley millet, sugar cane and switchgrass.

12. An isolated polynucleotide comprising:
(i) a nucleic acid sequence encoding a polypeptide having an amino acid sequence of at least 85%, sequence identity, based on the Clustal V method of alignment, when compared to SEQ ID NO: 35 or (ii) a full complement of the nucleic acid sequence of (i).

13. The polynucleotide of claim 12, wherein the amino acid sequence of the polypeptide comprises SEQ ID NO: 35.

14. The polynucleotide of claim 12 wherein the nucleotide sequence comprises SEQ ID NO: 34.

15. A plant or seed comprising a recombinant DNA construct, wherein the recombinant DNA construct comprises the polynucleotide of any one of claims 12 to 14 operably linked to at least one regulatory sequence.
